(19) United States
(12) Patent Application Publication
(10) Pub. No.: US 2024/0002480 A1
(43) Pub. Date: Jan. 4, 2024

(54) BROADLY NEUTRALIZING ANTIBODIES TO TICK-BORNE ENCEPHALITIS AND RELATED VIRUSES

(71) Applicant: The Rockefeller University, New York, NY (US)

(72) Inventors: Michel Nussenzweig, New York, NY (US); Davide F. Robbiani, New York, NY (US)

(73) Assignee: The Rockefeller University, New York, NY (US)

(21) Appl. No.: 18/253,981

(22) PCT Filed: Nov. 23, 2021
(86) PCT No.: PCT/US21/60595

§ 371 Date: May 23, 2023

Related U.S. Application Data
(60) Provisional application No. 63/118,461, filed on Nov. 25, 2020.

(51) Int. Cl. C07K 16/10; A61P 31/14; G01N 33/569

(52) U.S. Cl. CPC C07K 16/1081; A61P 31/14; G01N 33/56983; C07K 2317/34; C07K 2317/76; A61K 2039/505

(57) ABSTRACT

This disclosure provides novel broadly neutralizing anti-tick-borne encephalitis virus (TBEV) antibodies. The disclosed anti-TBEV antibodies represent a novel therapeutic strategy for preventing or treating diseases or infections caused by various tick-borne flaviviruses, including TBEV.

### CROSS-REFERENCE TO RELATED APPLICATIONS

[0001] The present application is a National Stage Application under 35 U.S.C. § 371 of International Application No. PCT/US2021/060595 filed Nov. 23, 2021, which claims benefit of U.S. Provisional Application No. 63/118,461 filed Nov. 25, 2020, the disclosures of all of which are hereby incorporated by reference in their entireties.

### STATEMENT REGARDING FEDERALLY FUNDED RESEARCH

[0002] This invention was made with government support under grant nos. P01-AI138398 and U19-AI111825 awarded by the National Institutes of Health. The government has certain rights in the invention.

### SEQUENCE LISTING

[0003] The instant application contains a Sequence Listing which has been submitted electronically in ASCII format and is hereby incorporated by reference in its entirety. Said ASCII copy, created on Jan. 17, 2022, is named 070413_20653_SL.txt and is 4,262,452 bytes in size.

### FIELD OF THE INVENTION

[0004] The present invention relates to antibodies directed to epitopes of tick-borne flaviviruses, including tick-borne encephalitis virus (TBEV).

### BACKGROUND

[0005] Tick-borne flaviviruses are responsible for a series of emerging infectious diseases, including fatal encephalitis. As with other flaviviruses, the TBEV envelope (E) is composed of three structural domains EDI-III. Tick-borne encephalitis virus (TBEV) is one of the seven flaviviruses transmitted by ticks causing human disease. Upwards of 10,000 cases per year are reported, with a trend for increased incidence in recent years and the emergence of the disease in new geographic regions.

[0006] The bite of an infected tick, or the consumption of unpasteurized milk from infected animals, causes a biphasic illness, which begins with a period of influenza-like symptoms followed by the development of neurological disease (tick-borne encephalitis or TBE). There is no specific therapy for TBE, and treatment is limited to supportive care. For those individuals that survive, long-term sequelae are common. Although TBEV vaccines are available, immunity requires regular boosting, and vaccination is less effective in the young and elderly. Vaccination requires administration of three separate doses spaced over up to two years, with booster doses recommended at intervals of 3-5 years. Moreover, breakthrough TBEV infection occurs despite vaccination.

[0007] Accordingly, there remains a strong need for anti-TBEV antibodies with improved neutralizing potency and breadth that are effective in prevention and treatment of diseases or infection caused by tick-borne flaviviruses, such as TBEV.

### SUMMARY

[0008] This disclosure addresses the need mentioned above in a number of aspects by providing broadly neutralizing anti-TBEV antibodies or antigen-binding fragments thereof.

[0009] In one aspect, this disclosure provides an isolated anti-TBEV antibody or antigen-binding fragment thereof that binds specifically to a TBEV antigen. In some embodiments, the TBEV antigen comprises a lateral ridge of domain III of the E protein (EDIII). In some embodiments, the antibody or antigen-binding fragment thereof is capable of neutralizing a plurality of TBEV strains.

[0010] In some embodiments, the antibody or antigen-binding fragment thereof comprises: (i) a heavy chain variable region having an amino acid sequence with at least 75% identity to one selected from those in Tables 2A-I, 3, and 4 or (ii) a light chain variable region having an amino acid sequence with at least 75% identity to one selected from those in Tables 2A-I, 3, and 4. In some examples, the antibody or antigen-binding fragment thereof comprises: (i) the three heavy chain CDRs (HCDRs 1-3) of one selected from those in Tables 2A-I, 3, and 4, and/or (ii) the three light chain CDRs (LCDRs 1-3) of one selected from those in Tables 2A-I, 3, and 4. In some embodiments, the antibody or antigen-binding fragment thereof comprises the six CDRs of one selected from those in Tables 2A-I, 3, and 4.

[0011] In some embodiments, the antibody or antigen-binding fragment thereof comprises: three heavy chain complementarity determining regions (HCDRs) (HCDR1, HCDR2, and HCDR3) of a heavy chain variable region having an amino acid sequence of SEQ ID NO: 1, 3, 5, 7, 9, 11, 13, 15, 17, 19, 21, 23, 25, 27, 29, 31, 33, 35, 37, 39, 41, 43, 45, 47, 49, 51, 53, 55, 57, 59, 61, 63, 65, 67, 69, 71, 73, 75, 77, 79, 81, 83, 85, 87, 89, 91, 93, 95, 97, 99, 101, 103, 105, 107, 109, 111, 113, 115, or 117; and three light chain CDRs (LCDR1, LCDR2, and LCDR3) of a light chain variable region having the amino acid sequence of SEQ ID NO: 2, 4, 6, 8, 10, 12, 14, 16, 18, 20, 22, 24, 26, 28, 30, 32, 34, 36, 38, 40, 42, 44, 46, 48, 50, 52, 54, 56, 58, 60, 62, 64, 66, 68, 70, 72, 74, 76, 78, 80, 82, 84, 86, 88, 90, 92, 94, 96, 98, 100, 102, 104, 106, 108, 110, 112, 114, 116, or 118.

[0012] In some embodiments, the antibody or antigen-binding fragment thereof comprises: a heavy chain variable region having an amino acid sequence with at least 75% identity to the amino acid sequence of SEQ ID NO: 1, 3, 5, 7, 9, 11, 13, 15, 17, 19, 21, 23, 25, 27, 29, 31, 33, 35, 37, 39, 41, 43, 45, 47, 49, 51, 53, 55, 57, 59, 61, 63, 65, 67, 69, 71, 73, 75, 77, 79, 81, 83, 85, 87, 89, 91, 93, 95, 97, 99, 101, 103, 105, 107, 109, 111, 113, 115, or 117; or having the amino acid sequence of SEQ ID NO: 1, 3, 5, 7, 9, 11, 13, 15, 17, 19, 21, 23, 25, 27, 29, 31, 33, 35, 37, 39, 41, 43, 45, 47, 49, 51, 53, 55, 57, 59, 61, 63, 65, 67, 69, 71, 73, 75, 77, 79, 81, 83, 85, 87, 89, 91, 93, 95, 97, 99, 101, 103, 105, 107, 109, 111, 113, 115, or 117; and a light chain variable region having an amino acid sequence with at least 75% identity to the amino acid sequence of SEQ ID NO: 2, 4, 6, 8, 10, 12, 14, 16, 18, 20, 22, 24, 26, 28, 30, 32, 34, 36, 38, 40, 42, 44, 46, 48, 50, 52, 54, 56, 58, 60, 62, 64, 66, 68, 70, 72, 74, 76, 78, 80, 82, 84, 86, 88, 90, 92, 94, 96, 98, 100, 102, 104, 106, 108, 110, 112, 114, 116, or 118; or having the amino acid sequence of SEQ ID NO: 2, 4, 6, 8, 10, 12, 14, 16, 18, 20, 22, 24, 26, 28, 30, 32, 34, 36, 38, 40, 42, 44, 46, 48, 50, 52, 54, 56, 58, 60, 62, 64, 66, 68, 70, 72, 74, 76, 78, 80, 82, 84, 86, 88, 90, 92, 94, 96, 98, 100, 102, 104, 106, 108, 110, 112, 114, 116, or 118.

[0013] In some embodiments, the antibody or antigen-binding fragment thereof comprises: a heavy chain variable region and a light chain variable region that comprise the respective amino acid sequences of SEQ ID NOs: 1-2, 3-4, 5-6, 7-8, 9-10, 11-12, 13-14, 15-16, 17-18, 19-20, 21-22, 23-24, 25-26, 27-28, 29-30, 31-32, 33-34, 35-36, 37-38, 39-40, 41-42, 43-44, 45-46, 47-48, 49-50, 51-52, 53-54, 55-56, 57-58, 59-60, 61-62, 63-64, 65-66, 67-68, 69-70, 71-72, 73-74, 75-76, 77-78, 79-80, 81-82, 83-84, 85-86, 87-88, 89-90, 91-92, 93-94, 95-96, 97-98, 99-100, 101-102, 103-104, 105-106, 107-108, 109-110, 111-112, 113-114, 115-116, or 117-118.

[0014] In some embodiments, the antibody is a multivalent antibody, e.g., a bivalent or bispecific antibody. In some embodiments, the antibody or the antigen-binding fragment thereof further comprises a variant Fc constant region. In some embodiments, the antibody is a monoclonal antibody. In some embodiments, the antibody is a chimeric antibody, a human antibody, a humanized antibody, or a humanized monoclonal antibody. In some embodiments, the antibody is a single-chain antibody, a Fab fragment or a Fab2 fragment.

[0015] In some embodiments, the antibody or antigen-binding fragment thereof is detectably labeled or conjugated to a toxin, a therapeutic agent, a polymer, a receptor, an enzyme, or a receptor ligand. In some embodiments, the polymer is polyethylene glycol (PEG).

[0016] In another aspect, this disclosure also provides a pharmaceutical composition comprising an antibody or antigen-binding fragment thereof described above and optionally a pharmaceutically acceptable carrier or excipient.

[0017] In some embodiments, the pharmaceutical composition comprises two or more of the antibodies or antigen-binding fragments thereof described above. In some example, each antibody or antigen-binding fragment thereof comprises (i) HCDRs1-3 and LCDRs1-3 of an antibody selected from those in Tables 2A-I, 3, and 4, or (ii) a heavy chain variable region and a light chain variable region that comprise the respective amino acid sequences of an antibody selected from those in Tables 2A-I, 3, and 4.

[0018] In some embodiments, the two or more of the antibody or antigen-binding fragment thereof comprise: (1) a first antibody set comprising: (i) a first antibody or antigen-binding fragment thereof comprising a heavy chain variable region and a light chain variable region comprising the respective amino acid sequences of a first antibody selected from those in Tables 2A-I, 3, and 4; and (ii) a second antibody or antigen-binding fragment thereof comprising a heavy chain variable region and a light chain variable region comprising the respective amino acid sequences of a second antibody selected from those in Tables 2A-I, 3, and 4; or (2) a second antibody set comprising: (a) a third antibody or antigen-binding fragment thereof comprising a heavy chain variable region and a light chain variable region comprising the respective amino acid sequences of antibody selected from those in Tables 2A-I, 3, and 4; and (b) a fourth antibody or antigen-binding fragment thereof comprising a heavy chain variable region and a light chain variable region comprising the respective amino acid sequences of an antibody selected from those in Tables 2A-I, 3, and 4, wherein the third antibody is different from the fourth antibody.

[0019] In some embodiments, the pharmaceutical composition further comprises a second therapeutic agent. In some embodiments, the second therapeutic agent comprises an anti-inflammatory agent or an antiviral agent. In some embodiments, the antiviral agent comprises: a nucleoside analog, a peptoid, an oligopeptide, a polypeptide, a protease inhibitor, a 3C-like protease inhibitor, a papain-like protease inhibitor, or an inhibitor of an RNA dependent RNA polymerase. In some embodiments, the antiviral agent may include: acyclovir, gancyclovir, vidarabine, foscarnet, cidofovir, amantadine, ribavirin, trifluorothymidine, zidovudine, didanosine, zalcitabine or an interferon. In some embodiments, the interferon is an interferon-α or an interferon-β.

[0020] Also within the scope of this disclosure is use of the described pharmaceutical composition in the preparation of a medicament for the diagnosis, prophylaxis, treatment, or combination thereof of a condition resulting from tick-borne flavivirus (e.g., TBEV) infection.

[0021] In another aspect, this disclosure also provides (i) a nucleic acid molecule encoding a polypeptide chain of the antibody or antigen-binding fragment thereof described above; (ii) a vector comprising the nucleic acid molecule as described; and (iii) a cultured host cell comprising the vector as described.

[0022] Also provided is a method for producing a polypeptide (e.g., an anti-TBEV antibody), comprising: (a) obtaining the cultured host cell as described; (b) culturing the cultured host cell in a medium under conditions permitting expression of a polypeptide encoded by the vector and assembling of an antibody or fragment thereof, and (c) purifying the antibody or fragment from the cultured cell or the medium of the cell.

[0023] In another aspect, this disclosure provides a kit comprising a pharmaceutically acceptable dose unit of the antibody or antigen-binding fragment thereof or a pharmaceutical composition as described above. Also within the scope of this disclosure is a kit for the diagnosis, prognosis or monitoring the treatment of tick-borne flavivirus (e.g., TBEV) in a subject, comprising: the antibody or antigen-binding fragment thereof as described; and a least one detection reagent that binds specifically to the antibody or antigen-binding fragment thereof.

[0024] In yet another aspect, this disclosure further provides a method of neutralizing a tick-borne encephalitis virus (e.g., TBEV) in a subject. The method comprises administering to a subject in need thereof a therapeutically effective amount of the antibody or antigen-binding fragment thereof or a therapeutically effective amount of the pharmaceutical composition, as described above.

[0025] In some embodiments, the method of neutralizing a tick-borne flavivirus (e.g., TBEV) in a subject comprises administering to a subject in need thereof a therapeutically effective amount of a first antibody or antigen-binding fragment thereof and a second antibody or antigen-binding fragment thereof of the antibody or antigen-binding fragment, as described above, wherein the first antibody or antigen-binding fragment thereof and the second antibody or antigen binding fragment thereof exhibit synergistic activity or a therapeutically effective amount of the pharmaceutical composition described above.

[0026] In yet another aspect, this disclosure additionally provides a method of preventing or treating tick-borne flavivirus (e.g., TBEV) infection. The method comprises administering to a subject in need thereof a therapeutically effective amount of the antibody or antigen-binding fragment thereof or a therapeutically effective amount of the pharmaceutical composition, as described above.

[0027] In some embodiments, the method comprises administering to a subject in need thereof a therapeutically effective amount of a first antibody or antigen-binding fragment thereof and a second antibody or antigen-binding fragment thereof of the antibody or antigen-binding fragment, as described above, wherein the first antibody or antigen-binding fragment thereof and the second antibody or antigen binding fragment thereof exhibit synergistic activity or a therapeutically effective amount of the pharmaceutical composition described above. In some embodiments, the first antibody or antigen-binding fragment thereof is administered before, after, or concurrently with the second antibody or antigen-binding fragment thereof.

[0028] In some embodiments, the first antibody or antigen-binding fragment thereof and the second antibody or antigen-binding fragment thereof can be any combinations of the antibody or antigen-binding fragment thereof comprising a heavy chain variable region and a light chain variable region that comprise the respective amino acid sequences of an antibody selected from those in Tables 2A-I, 3, and 4.

[0029] In some embodiments, the second therapeutic agent comprises an anti-inflammatory agent or an antiviral agent. In some embodiments, the antiviral agent comprises a nucleoside analog, a peptoid, an oligopeptide, a polypeptide, a protease inhibitor, a 3C-like protease inhibitor, a papain-like protease inhibitor, or an inhibitor of an RNA dependent RNA polymerase. In some embodiments, the antiviral agent may include: acyclovir, gancyclovir, vidarabine, foscarnet, cidofovir, amantadine, ribavirin, trifluorothymidine, zidovudine, didanosine, zalcitabine or an interferon. In some embodiments, the interferon is an interferon-α or an interferon-β.

[0030] In some embodiments, the antibody or antigen-binding fragment thereof is administered before, after, or concurrently with the second therapeutic agent or therapy. In some embodiments, the antibody or antigen-binding fragment thereof is administered to the subject intravenously, subcutaneously, or intraperitoneally. In some embodiments, the antibody or antigen-binding fragment thereof is administered prophylactically or therapeutically.

[0031] In another aspect, this disclosure further provides a method for detecting the presence of a tick-borne flavivirus (e.g., TBEV) in a sample comprising the steps of: (i) contacting a sample with the antibody or antigen-binding fragment thereof described above; and (ii) determining binding of the antibody or antigen-binding fragment to one or more tick-borne flavivirus (e.g., TBEV) antigens, wherein binding of the antibody to the one or more tick-borne flavivirus (e.g., TBEV) antigens is indicative of the presence of the tick-borne flavivirus (e.g., TBEV) in the sample. In some embodiments, the sample is a blood sample.

[0032] In some embodiments, the antibody or antigen-binding fragment thereof is conjugated to a label. In some embodiments, the step of detecting comprises contacting a secondary antibody with the antibody or antigen-binding fragment thereof and wherein the secondary antibody comprises a label. In some embodiments, the label includes a fluorescent label, a chemiluminescent label, a radiolabel, and an enzyme.

[0033] In some embodiments, the step of detecting comprises detecting fluorescence or chemiluminescence. In some embodiments, the step of detecting comprises a competitive binding assay or ELISA.

[0034] In some embodiments, the method further comprises binding the sample to a solid support. In some embodiments, the solid support includes microparticles, microbeads, magnetic beads, and an affinity purification column.

[0035] The foregoing summary is not intended to define every aspect of the disclosure, and additional aspects are described in other sections, such as the following detailed description. The entire document is intended to be related as a unified disclosure, and it should be understood that all combinations of features described herein are contemplated, even if the combination of features are not found together in the same sentence, or paragraph, or section of this document. Other features and advantages of the invention will become apparent from the following detailed description. It should be understood, however, that the detailed description and the specific examples, while indicating specific embodiments of the disclosure, are given by way of illustration only, because various changes and modifications within the spirit and scope of the disclosure will become apparent to those skilled in the art from this detailed description.

### BRIEF DESCRIPTION OF THE DRAWINGS

[0036] FIGS. 1A, 1B, 1C, 1D, and 1E are a set of diagrams showing the results of screening individuals for TBEV antibodies. FIG. 1A is a diagrammatic representation of the clinical course of tick-borne encephalitis. The approximate time of serum collection in yellow. FIG. 1B shows the results of TBEV EDIII IgG ELISA. The graph shows optical density measurement (Y axis) relative to a negative control serum for samples from 141 TBEV infected individuals, 10 TBEV vaccinees, and 168 random blood donors (1:500 dilution). The p values were calculated by one-way ANOVA followed by Tukey's test. Horizontal lines indicate the mean. FIG. 1C shows the results of TBEV RVP neutralization screening. Graph shows ranked serum neutralizing activity (1:600,000 dilution) against TBEV reporter virus particles (RVPs; average of duplicate wells) relative to no serum control. The orange box (bottom left) indicates the 28 best neutralizers of 141 TBEV infected individuals and 10 TBEV vaccinees tested. The p value is by two-tailed Mann-Whitney test. FIG. 1D shows TBEV RVP neutralization curves. The plot shows representative neutralization curves for each of the 28 most potent sera from FIG. 1C. Representative of 2 experiments, each performed in triplicate. Error bars indicate standard deviation. FIG. 1E shows ranked half-maximal serum neutralizing titers (NT₅₀) for the top 28 individuals. Average of two independent experiments. In FIGS. 1D and 1E, orange indicates the donors of peripheral blood mononuclear cells for antibody cloning.

[0037] FIGS. 2A, 2B, 2C, 2D, 2E, 2F, 2G, 2H, 2I, 2J, 2K, 2L, 2M, 2N, and 2O are a set of diagrams showing clinical correlations and serum neutralization in vaccinees. FIGS. 2A, 2B, 2C, 2D, 2E, and 2F show serum TBEV EDIII ELISA data (IgG) plotted against demographic and available clinical information. FIGS. 2G, 2H, 2I, and 2L show serum TBEV RVP neutralization data plotted against demographic and available clinical information. FIGS. 2C and 21 show severity of disease; FIGS. 2D and 2J show IgM titers (IP) measured at the time of hospitalization; FIGS. 2E and 2K show IgG titers (Vienna units/mL) measured at the time of hospitalization. Statistical significance was calculated for FIGS. 2A, 2B, 2D, 2E, 2G, 2H, 2J, and 2K using two-tailed p tests; for FIGS. 2L and 2F using Mann-Whitney tests; and for FIGS. 2C and 2I using one-way ANOVA with Tukey's test. FIG. 2M shows a correlation between serum TBEV EDIII ELISA (IgG) and RVP neutralization data. FIG. 2N shows TBEV RVP neutralization curves with sera from vaccinated PBMC donors. Representative of two experiments, in triplicates. Mean with standard deviation. FIG. 2O is a summary of serum NT₅₀s for all infected and vaccinated PBMC donors.

[0038] FIGS. 3A, 3B, 3C, and 3D are a set of diagrams showing anti-TBEV antibodies from infected and vaccinated individuals. FIG. 3A shows identification of TBEV-specific B cells from infected donors. Representative flow cytometry plots showing B cells binding to AF647- and PE-labeled TBEV EDIII in one control and six TBEV infected donors. Numbers indicate the percentage of double-positive B cells. The gating strategy is shown in FIG. 4A. FIG. 3B shows the clonal analysis of antibody sequences. Pie charts show the distribution of antibody sequences. The number in the center represents the total number of antibody sequences obtained. Colored or grey pie slices correspond to clonally related sequences, with the size of the slice proportional to the number of sequences. All blue slices are IGVH1-69; all red slices IGVH3-48/IGVK1-5. White slices correspond to antibody sequences that are not part of a clone (singlets). FIGS. 3C and 3D are the same as in FIGS. 3A and 3B but for one healthy control and three vaccinated donors. FIG. 3E shows antibody sequence relatedness. Circos plot shows sequences from all donors with color-coding as in FIGS. 3B and 3D. Connecting lines indicate antibodies that share IGH and IGL V and J genes. Purple, green, and grey lines connect related clones to each other, clones to singlets, and singlets to singlets, respectively.

[0039] FIGS. 4A, 4B, 4C, 4D, 4E, 4F, 4G, 4H, and 4I are a set of diagrams showing the sorting strategy and antibody sequence analysis. FIG. 4A shows the sorting strategy. Forward- and side-scatter were used to gate on single lymphocytes. Dump channel included CD3, CD8, CD14, CD16, and a viability dye. CD20⁺ B cells that failed to bind Ovalbumin (OVA⁻) but did bind to the TBEV EDIII bait coupled with both PE and AF647 fluorophores were purified. FIG. 4B shows the number of V gene somatic nucleotide mutations (left) and the amino acid length of the CDR3 (right) for each donor. FIG. 4C as in FIG. 4B, but for all donors combined. For FIGS. 4B and 4C, horizontal lines indicate the mean. FIG. 4 shows distribution of hydrophobicity GRAVY scores at the IGH CDR3 of antibodies from all donors combined and compared to human repertoire (Briney, B., et al., (2019) Nature 566, 393-397). FIG. 4E shows a bar graph depicting the frequency of V heavy chain gene usage in TBEV antibodies from infected donors compared to the human repertoire (Rubelt, F., et al., (2012) PLoS One 7, e49774). FIGS. 4F and 4G, as in FIG. 4E, but for V kappa and V lambda genes. In FIGS. 4E, 4F, and 4G, orange indicates anti-TBEV antibodies isolated in this study, while blue indicates control repertoire; p values calculated using two-tailed t-test with unequal variances. FIG. 4H shows sequence logos for antibody CDR3s from infected donors generated by WebLogo. The height of the stack indicates the sequence conservation at a given position, while the height of letters within the stack indicates the relative frequency of each amino acid at that position. FIG. 4I shows examples of highly similar antibody sequences found in across multiple donors. FIG. 4I discloses SEQ ID NOS 277, 4135, 2443, 1879, 1543, 6669, 643, 643, 643, 3787, 421, 2419, 1945, 355, 6670, 6670, 6670-6673, 1294, 1294, 3232, 3790, 424, 6674-6676, respectively, in order of column.

[0040] FIGS. 5A, 5B, 5C, 5D, 5E, 5F, and 5G are a set of diagrams showing identification of potent and broadly cross-reactive monoclonal antibodies. FIG. 5A shows TBEV^{WE} EDIII ELISA binding curves for 46 and 13 monoclonals from infected and vaccinated individuals, respectively. Data is representative of 2 experiments. The dotted line is 10-1074 isotype control. FIG. 5B shows a dot plot summarizing the EC₅₀ values for the antibodies in FIG. 5A to the three TBEV lineages EDIIIs: TBEV^{WE}, TBEV^{FE}, and TBEV^{SI}. Average of 2 experiments. The horizontal lines indicate the mean value. FIG. 5C shows RVP neutralization curves for the antibodies in FIG. 5A normalized to no antibody control. Data is representative of 2 experiments, each performed in triplicate. Error bars indicate standard deviation. FIG. 5D shows a dot plot summarizing the average half-maximal inhibitory concentration (IC₅₀) for TBEV^{WE} RVP neutralization by the antibodies in A. Average of two experiments. The horizontal line indicates the mean IC₅₀. No statistical difference was found by two-tailed Mann-Whitney test. FIGS. 5E and 5F show TBEV neutralization in vitro. In FIG. 5E, Curves represent virus neutralization by serially diluted antibodies. Representative of two independent experiments performed in octuplicates. In FIG. 5F, Representative immunofluorescence microscopy images of PS cells infected in the presence of the indicated antibodies. Green is viral antigen, and blue is cell nuclei. Scale bar indicates 200 μm. FIG. 5G shows cross-neutralization by anti-TBEV antibodies. The graph shows IC₅₀ for selected antibodies against RVPs corresponding to Powassan LB (POWV-LB), Powassan DTV (POWV-DTV), Kyasanur Forest Disease (KFDV), Langat (LGTV), louping Ill (LIV), and Omsk Hemorrhagic Fever viruses (OHFV). Average of two independent experiments. The horizontal line indicates the mean IC₅₀. In FIGS. 5A, 5B, 5C, 5D, and 5E, blue and red indicate infected donor-derived IGVH1-69/Kappa and IGVH3-48/IGVK1-5 antibodies; while purple indicates IGHV1-69/Kappa antibodies from vaccinated individuals. Antibodies T036 and T025 are shown in yellow and orange, respectively. In FIGS. 5B, 5D, and 5G closed circles and triangles correspond to antibodies derived from infected or vaccinated donors, respectively.

[0041] FIGS. 6A, 6B, 6C, 6D, 6E, 6F, 6G, 6H, and 6I are a set of diagrams showing antibody binding and neutralization. FIG. 6A shows ELISA binding curves to TBEV^{FE} and TBEV_{Si} EDIII for the 59 antibodies. Data are representative of two experiments. FIG. 6B shows screening for antibodies binding to a panel of tick-borne flavivirus EDIIIs, including Powassan LB (POWV-LB), Powassan Deer Tick (POWV-DTV), Kyasanur Forest Disease (KFDV), Langat (LGTV), louping Ill (LIV), and Omsk Hemorrhagic Fever viruses (OHFV). Antibodies were screened in duplicate at 1 μg/mL. Grey indicates binding over control. FIG. 6C shows screening for antibodies neutralization against RVPs corresponding to the same panel of tick-borne flaviviruses as in FIG. 6B. Antibodies were screened in triplicates at 1 g/mL. Grey indicates binding over control. FIGS. 6D, 6E, 6F, 6G, 6H, and 6I show neutralization curves of selected antibodies against tick-borne flavivirus RVPs other than TBEV. Representative of two experiments, in triplicates.

[0042] FIGS. 7A, 7B, 7C, 7D, and 7E are a set of diagrams showing that T036 enhances TBEV infection. FIG. 7A shows dose-dependent enhancement of TBEV RVP infection in the presence of T036 IgG, F(ab′)2, and F(ab). Representative of two experiments performed in triplicate. Error bars indicate standard deviation. FIG. 7B shows enhancement of virus titers. The plot shows Hypr-TBEV virus titers after incubation of PS cells for 24 or 48 hours in the presence of neutralizing antibody T038, enhancing antibody T036 or isotype control 10-1074. p values were calculated using one-way ANOVA and Tukey tests. The dashed line represents the limit of detection of the assay. FIG. 7C. Enhanced detection of viral antigen. Representative microscopy images of PS cells infected with Hypr-TBEV in the presence of the indicated amounts of T036, T038 or 10-1074 control. Scale bar indicates 200 m. FIGS. 7D and 7E. The fusion loop binding antibody 4G2 blocks the enhancement effect by T036. In FIG. 7D, TBEV RVP infection relative to no antibody control in the presence of antibody 4G2, T036 or 4G2 in combination with T036. Representative of two experiments. In FIG. 7E, cell plaques counts after infection of PS cells with Hypr-TBEV in the presence of 4G2, T036, or 4G2 and T036 in combination. For FIGS. 7D and 7E, the p values were calculated using one-way ANOVA and Tukey tests; error bars in D indicate the standard deviation of triplicates.

[0043] FIGS. 8A and 8B are a set of diagrams showing that T036 enhances TBEV infection. FIG. 8A is a plot showing TBEV Neudoerfl titers after infection of PS cells and incubation for 24 or 48 hours in the presence of T036, neutralizing antibody T038 or isotype control 10-1074. p values were calculated with one-way ANOVA and Tukey's test. FIG. 8B shows representative immunofluorescence microscopy images upon of PS cells with TBEV Neudoerfl in the presence of the indicated antibodies. Green is viral antigen, and blue is cell nuclei. Scale bar indicates 200 m.

[0044] FIGS. 9A, 9B, 9C, and 9D are a set of diagrams showing that the T025 antibody recognizes a lateral ridge epitope on TBEV EDIII that is exposed on the mature virus structure. FIG. 9A shows T025 recognition of the TBEV^{WE} EDIII. T025 interacts with the N-terminal region (EDI-EDIII hinge, the BC loop, and the DE loop) on TBEV^{WE} EDIII. FIG. 9B shows a T025 epitope. TBEV^{WE} EDIII residues with an atom within 4 Å of a residue in the T025 Fab are highlighted on a surface representation of the EDIII antigen. CDRH3 and CDRL3 are shown as ribbon backbone with stick side chains. FIG. 9C shows that T025 recognizes a similar epitope as the anti-TBEV mouse antibody 19/1786. The T025 epitope is shown in shades of orange; the 19/1786 epitope is outlined in a blue dashed line. Residues within the 19/1786 epitope, but not in the T025 epitope, are labeled. Epitopes are defined as residues that contain an atom within 4 Å of an atom in a residue on the antibody. FIG. 9D shows a surface representation of the cryo-EM structure of T025 (PDB 5O6A) shown with 5-fold, 3-fold, and 2-fold icosahedral symmetry operators at select vertices (left) with inset comparing binding poses of T025 and 19/1786 antibodies (right). Inset: close-up of the indicated portion (dotted box) of the cryo-EM structure of the viral surface interacting with the 19/1786 V_{H}V_{L} domains (PDB 506V) with the E protein domains labeled in red, yellow, and blue and the V_{H}V_{L} domains in teal and cyan. The T025-TBEV^{WE} EDIII crystal structure was docked onto a virion EDIII adjacent to an icosahedral 2-fold symmetry axis after alignment of the EDIII domains (RMSD=0.97 Å, 82 Cα atoms). The T025 V_{H}V_{L} binds EDIII with a similar pose as the 19/1786 V_{H}V_{L}.

[0045] FIGS. 10A and 10B are a set of diagrams showing prevention and therapy with T025. FIG. 10A shows that T025 is efficacious in pre-exposure prophylaxis. Mice were treated with T025 or 10-1074 (isotype control) 24 hours before infection with a lethal dose of TBEV-Hypr. Top, the histogram shows disease score overtime. Antibody dose is indicated on the right. Two independent experiments combined. Bottom, Kaplan Meyer survival curve. The p value was calculated with the Mantel-Cox test (p<0.0001). FIG. 10B shows that T025 protects mice when administered after infection. Mice were treated with 30 μg of T025 or control 10-1074 at 1, 3, or 5 days post infection (DPI). Three experiments combined and p<0.0001 for both +1 DPI and +3 DPI by Mantel-Cox test.

### DETAILED DESCRIPTION OF THE INVENTION

[0046] This disclosure describes anti-TBEV antibodies with unexpected broadly neutralizing activities. In addition to TBEV, these antibodies also neutralize other emerging tick-borne flaviviruses, including Langat, louping ill, Omsk hemorrhagic fever, Kyasanur forest disease, and Powassan viruses. Thus, the disclosed antibodies and antigen-binding fragments represent a novel therapeutic strategy for preventing or treating diseases or infections caused by various tick-borne flaviviruses, including TBEV.

### A. Broadly Neutralizing Anti-TBEV Antibodies

[0047] Antibodies

[0048] The invention disclosed herein involves broadly neutralizing anti-TBEV antibodies or antigen-binding fragments thereof. These antibodies refer to a class of neutralizing antibodies that neutralize multiple tick-borne flaviviruses and strains thereof. The antibodies are able to protect a subject prophylactically and therapeutically against a lethal challenge with a tick-borne flavivirus (e.g., TBEV).

[0049] In one aspect, this disclosure provides an isolated anti-TBEV antibody or antigen-binding fragment thereof that binds specifically to a tick-borne flavivirus (e.g., TBEV) antigen. In some embodiments, the antigen comprises a lateral ridge of EDIII.

[0050] Listed below in Tables 2A-I, 3, and 4 are representative amino acid and/or nucleic acid sequences of the heavy chain (HC) variable regions and light chain (LC) variable regions of exemplary anti-TBEV antibodies.

[0051] In some embodiments, the antibody or antigen-binding fragment thereof comprises: (i) a heavy chain variable region having an amino acid sequence with at least 75% (e.g., 75%, 50%, 85%, 90%, 92%, 94%, 95%, 96%, 97%, 98%, 99%) identity to one selected from the Tables 2A-I, 3, and 4 and (ii) a light chain variable region having an amino acid sequence with at least 75% (e.g., 75%, 50%, 85%, 90%, 92%, 94%, 95%, 96%, 97%, 98%, 99%) identity to one selected from Tables 2A-I, 3, and 4. In some embodiments, the antibody or antigen-binding fragment thereof comprises: (i) the three heavy chain CDRs (HCDRs 1-3) of one selected from those in Tables 2A-I, 3, and 4, and/or (ii) the three light chain CDRs (LCDRs 1-3) of one selected from those in Tables 2A-I, 3, and 4. In some embodiments, the antibody or antigen-binding fragment thereof comprises the six CDRs of one selected from those in Tables 2A-I, 3, and 4.

[0052] In some embodiments, the antibody or antigen-binding fragment thereof comprises: three heavy chain complementarity determining regions (HCDRs) (HCDR1, HCDR2, and HCDR3) of a heavy chain variable region having an amino acid sequence of SEQ ID NO: 1, 3, 5, 7, 9, 11, 13, 15, 17, 19, 21, 23, 25, 27, 29, 31, 33, 35, 37, 39, 41, 43, 45, 47, 49, 51, 53, 55, 57, 59, 61, 63, 65, 67, 69, 71, 73, 75, 77, 79, 81, 83, 85, 87, 89, 91, 93, 95, 97, 99, 101, 103, 105, 107, 109, 111, 113, 115, or 117; and three light chain CDRs (LCDR1, LCDR2, and LCDR3) of a light chain variable region having the amino acid sequence of SEQ ID NO: 2, 4, 6, 8, 10, 12, 14, 16, 18, 20, 22, 24, 26, 28, 30, 32, 34, 36, 38, 40, 42, 44, 46, 48, 50, 52, 54, 56, 58, 60, 62, 64, 66, 68, 70, 72, 74, 76, 78, 80, 82, 84, 86, 88, 90, 92, 94, 96, 98, 100, 102, 104, 106, 108, 110, 112, 114, 116, or 118.

[0053] In some embodiments, the antibody or antigen-binding fragment thereof comprises: a heavy chain variable region having an amino acid sequence with at least 75% identity to the amino acid sequence of SEQ ID NO: 1, 3, 5, 7, 9, 11, 13, 15, 17, 19, 21, 23, 25, 27, 29, 31, 33, 35, 37, 39, 41, 43, 45, 47, 49, 51, 53, 55, 57, 59, 61, 63, 65, 67, 69, 71, 73, 75, 77, 79, 81, 83, 85, 87, 89, 91, 93, 95, 97, 99, 101, 103, 105, 107, 109, 111, 113, 115, or 117; or having the amino acid sequence of SEQ ID NO: 1, 3, 5, 7, 9, 11, 13, 15, 17, 19, 21, 23, 25, 27, 29, 31, 33, 35, 37, 39, 41, 43, 45, 47, 49, 51, 53, 55, 57, 59, 61, 63, 65, 67, 69, 71, 73, 75, 77, 79, 81, 83, 85, 87, 89, 91, 93, 95, 97, 99, 101, 103, 105, 107, 109, 111, 113, 115, or 117; and a light chain variable region having an amino acid sequence with at least 75% identity to the amino acid sequence of SEQ ID NO: 2, 4, 6, 8, 10, 12, 14, 16, 18, 20, 22, 24, 26, 28, 30, 32, 34, 36, 38, 40, 42, 44, 46, 48, 50, 52, 54, 56, 58, 60, 62, 64, 66, 68, 70, 72, 74, 76, 78, 80, 82, 84, 86, 88, 90, 92, 94, 96, 98, 100, 102, 104, 106, 108, 110, 112, 114, 116, or 118; or having the amino acid sequence of SEQ ID NO: 2, 4, 6, 8, 10, 12, 14, 16, 18, 20, 22, 24, 26, 28, 30, 32, 34, 36, 38, 40, 42, 44, 46, 48, 50, 52, 54, 56, 58, 60, 62, 64, 66, 68, 70, 72, 74, 76, 78, 80, 82, 84, 86, 88, 90, 92, 94, 96, 98, 100, 102, 104, 106, 108, 110, 112, 114, 116, or 118.

[0054] In some embodiments, the antibody or antigen-binding fragment thereof comprises: a heavy chain variable region and a light chain variable region that comprise the respective amino acid sequences of SEQ ID NOs: 1-2, 3-4, 5-6, 7-8, 9-10, 11-12, 13-14, 15-16, 17-18, 19-20, 21-22, 23-24, 25-26, 27-28, 29-30, 31-32, 33-34, 35-36, 37-38, 39-40, 41-42, 43-44, 45-46, 47-48, 49-50, 51-52, 53-54, 55-56, 57-58, 59-60, 61-62, 63-64, 65-66, 67-68, 69-70, 71-72, 73-74, 75-76, 77-78, 79-80, 81-82, 83-84, 85-86, 87-88, 89-90, 91-92, 93-94, 95-96, 97-98, 99-100, 101-102, 103-104, 105-106, 107-108, 109-110, 111-112, 113-114, 115-116, or 117-118.

[0055] In some embodiments, the antibody or the antigen-binding fragment thereof further comprises a variant Fc constant region. In some embodiments, the antibody is a monoclonal antibody. In some embodiments, the antibody is a chimeric antibody, a humanized antibody, or a humanized monoclonal antibody. In some embodiments, the antibody is a single-chain antibody, a Fab fragment or a Fab2 fragment.

[0056] In some embodiments, the antibody or the antigen-binding fragment thereof further comprises a variant Fc constant region. The antibody can be a monoclonal antibody. In some embodiments, the antibody can be a chimeric antibody, a humanized antibody, or a humanized monoclonal antibody. In some embodiments, the antibody can be a single-chain antibody, Fab or Fab2 fragment.

[0057] In some embodiments, the antibody or antigen-binding fragment thereof can be detectably labeled or conjugated to a toxin, a therapeutic agent, a polymer (e.g., polyethylene glycol (PEG)), a receptor, an enzyme or a receptor ligand. For example, an antibody of the present invention may be coupled to a toxin (e.g., a tetanus toxin). Such antibodies may be used to treat animals, including humans, that are infected with the virus that is etiologically linked to a tick-borne flavivirus (e.g., TBEV).

[0058] In another example, an antibody of the present invention may be coupled to a detectable tag. Such antibodies may be used within diagnostic assays to determine if an animal, such as a human, is infected with a tick-borne flavivirus (e.g., TBEV). Examples of detectable tags include: fluorescent proteins (i.e., green fluorescent protein, red fluorescent protein, yellow fluorescent protein), fluorescent markers (i.e., fluorescein isothiocyanate, rhodamine, texas red), radiolabels (i.e., 3H, 32P, 125I), enzymes (i.e., β-galactosidase, horseradish peroxidase, β-glucuronidase, alkaline phosphatase), or an affinity tag (i.e., avidin, biotin, streptavidin). Methods to couple antibodies to a detectable tag are known in the art. Harlow et al., Antibodies: A Laboratory Manual, page 319 (Cold Spring Harbor Pub. 1988).

[0059] Fragment

[0060] In some embodiments, an antibody provided herein is an antibody fragment. Antibody fragments include, but are not limited to, Fab, Fab′, Fab′-SH, F(ab′)2, Fv, and single-chain Fv (scFv) fragments, and other fragments described below, e.g., diabodies, triabodies tetrabodies, and single-domain antibodies. For a review of certain antibody fragments, see Hudson et al., Nat. Med. 9:129-134 (2003). For a review of scFv fragments, see, e.g., Pluckthun, in The Pharmacology of Monoclonal Antibodies, vol. 113, Rosenburg and Moore eds., (Springer-Verlag, New York), pp. 269-315 (1994); see also WO 93/16185; and U.S. Pat. Nos. 5,571,894 and 5,587,458. For discussion of Fab and F(ab′)2 fragments comprising salvage receptor binding epitope residues and having increased in vivo half-life, see U.S. Pat. No. 5,869,046.

[0061] Diabodies are antibody fragments with two antigen-binding sites that may be bivalent or bispecific. See, for example, EP 404,097; WO 1993/01161; Hudson et al., Nat. Med. 9:129-134 (2003); and Hollinger et al., Proc. Natl. Acad. Sci. USA 90: 6444-6448 (1993). Triabodies and tetrabodies are also described in Hudson et al., Nat. Med. 9:129-134 (2003).

[0062] Single-domain antibodies are antibody fragments comprising all or a portion of the heavy chain variable domain or all or a portion of the light chain variable domain of an antibody. In some embodiments, a single-domain antibody is a human single-domain antibody (DOMANTIS, Inc., Waltham, Mass.; see, e.g., U.S. Pat. No. 6,248,516).

[0063] Antibody fragments can be made by various techniques, including but not limited to proteolytic digestion of an intact antibody as well as production by recombinant host cells (e.g., E. coli or phage), as described herein.

[0064] Chimeric and Humanized Antibodies

[0065] In some embodiments, an antibody provided herein is a chimeric antibody. Certain chimeric antibodies are described, e.g., in U.S. Pat. No. 4,816,567; and Morrison et al., Proc. Natl. Acad. Sci. USA, 81:6851-6855 (1984)). In one example, a chimeric antibody comprises a non-human variable region (e.g., a variable region derived from a mouse, rat, hamster, rabbit, or non-human primate, such as a monkey) and a human constant region. In a further example, a chimeric antibody is a “class switched” antibody in which the class or subclass has been changed from that of the parent antibody. Chimeric antibodies include antigen-binding fragments thereof.

[0066] In some embodiments, a chimeric antibody is a humanized antibody. Typically, a non-human antibody is humanized to reduce immunogenicity to humans, while retaining the specificity and affinity of the parental non-human antibody. Generally, a humanized antibody comprises one or more variable domains in which HVRs, e.g., CDRs, (or portions thereof) are derived from a non-human antibody, and FRs (or portions thereof) are derived from human antibody sequences. A humanized antibody optionally will also comprise at least a portion of a human constant region. In some embodiments, some FR residues in a humanized antibody are substituted with corresponding residues from a non-human antibody (e.g., the antibody from which the HVR residues are derived), e.g., to restore or improve antibody specificity or affinity.

[0067] Humanized antibodies and methods of making them are reviewed, e.g., in Almagro and Fransson, Front. Biosci. 13:1619-1633 (2008), and are further described, e.g., in Riechmann et al., Nature 332:323-329 (1988); Queen et al., Proc. Nat'l Acad. Sci. USA 86:10029-10033 (1989); U.S. Pat. Nos. 5,821,337, 7,527,791, 6,982,321, and 7,087,409; Kashmiri et al., Methods 36:25-34 (2005) (describing specificity determining region (SDR) grafting); Padlan, Mol. Immunol. 28:489-498 (1991) (describing “resurfacing”); Dall'Acqua et al., Methods 36:43-60 (2005) (describing “FR shuffling”); and Osbourn et al., Methods 36:61-68 (2005) and Klimka et al., Br. J. Cancer, 83:252-260 (2000) (describing the “guided selection” approach to FR shuffling).

[0068] Human framework regions that may be used for humanization include but are not limited to: framework regions selected using the “best-fit” method (see, e.g., Sims et al. J. Immunol. 151:2296 (1993)); framework regions derived from the consensus sequence of human antibodies of a particular subgroup of light or heavy chain variable regions (see, e.g., Carter et al. Proc. Natl. Acad. Sci. USA, 89:4285 (1992); and Presta et al. J. Immunol., 151:2623 (1993)); human mature (somatically mutated) framework regions or human germline framework regions (see, e.g., Almagro and Fransson, Front. Biosci. 13:1619-1633 (2008)); and framework regions derived from screening FR libraries (see, e.g., Baca et al., J. Biol. Chem. 272:10678-10684 (1997) and Rosok et al., J. Biol. Chem. 271:22611-22618 (1996)).

[0069] Human Antibodies

[0070] In some embodiments, an antibody provided herein is a human antibody. Human antibodies can be produced using various techniques known in the art or using techniques described herein. Human antibodies are described generally in van Dijk and van de Winkel, Curr. Opin. Pharmacol. 5: 368-74 (2001) and Lonberg, Curr. Opin. Immunol. 20:450-459 (2008).

[0071] Human antibodies may be prepared by administering an immunogen to a transgenic animal that has been modified to produce intact human antibodies or intact antibodies with human variable regions in response to antigenic challenge. Such animals typically contain all or a portion of the human immunoglobulin loci, which replace the endogenous immunoglobulin loci, or which are present extrachromosomally or integrated randomly into the animal's chromosomes. In such transgenic mice, the endogenous immunoglobulin loci have generally been inactivated. For review of methods for obtaining human antibodies from transgenic animals, see Lonberg, Nat. Biotech. 23:1117-1125 (2005). See also, e.g., U.S. Pat. Nos. 6,075,181 and 6,150,584 describing XENOMOUSE technology; U.S. Pat. No. 5,770,429 describing HUMAB technology; U.S. Pat. No. 7,041,870 describing K-M MOUSE technology, and U.S. Patent Application Publication No. US 2007/0061900, describing VELOCIMOUSE technology). Human variable regions from intact antibodies generated by such animals may be further modified, e.g., by combining with a different human constant region.

[0072] Human antibodies can also be made by hybridoma-based methods. Human myeloma and mouse-human heteromyeloma cell lines for the production of human monoclonal antibodies have been described. (See, e.g., Kozbor J. Immunol., 133: 3001 (1984); Brodeur et al., Monoclonal Antibody Production Techniques and Applications, pp. 51-63 (Marcel Dekker, Inc., New York, 1987); and Boerner et al., J. Immunol., 147: 86 (1991).) Human antibodies generated via human B-cell hybridoma technology are also described in Li et al., Proc. Natl. Acad. Sci. USA, 103:3557-3562 (2006). Additional methods include those described, for example, in U.S. Pat. No. 7,189,826 (describing production of monoclonal human IgM antibodies from hybridoma cell lines) and Ni, Xiandai Mianyixue, 26(4):265-268 (2006) (describing human-human hybridomas). Human hybridoma technology (Trioma technology) is also described in Vollmers and Brandlein, Histology and Histopathology, 20(3):927-937 (2005) and Vollmers and Brandlein, Methods and Findings in Experimental and Clinical Pharmacology, 27(3):185-91 (2005).

[0073] Human antibodies may also be generated by isolating Fv clone variable domain sequences selected from human-derived phage display libraries. Such variable domain sequences may then be combined with a desired human constant domain. Techniques for selecting human antibodies from antibody libraries are described below.

[0074] Antibodies of the invention may be isolated by screening combinatorial libraries for antibodies with the desired activity or activities. For example, a variety of methods are known in the art for generating phage display libraries and screening such libraries for antibodies possessing the desired binding characteristics. Such methods are reviewed, e.g., in Hoogenboom et al., in Methods in Molecular Biology 178:1-37 (O'Brien et al., ed., Human Press, Totowa, N.J., 2001) and further described, e.g., in the McCafferty et al., Nature 348:552-554; Clackson et al., Nature 352: 624-628 (1991); Marks et al., J. Mol. Biol. 222: 581-597 (1992); Marks and Bradbury, in Methods in Molecular Biology 248:161-175 (Lo, ed., Human Press, Totowa, N.J., 2003); Sidhu et al., J. Mol. Biol. 338(2): 299-310 (2004); Lee et al., J. Mol. Biol. 340(5): 1073-1093 (2004); Fellouse, Proc. Natl. Acad. Sci. USA 101(34): 12467-12472 (2004); and Lee et al., J. Immunol. Methods 284(1-2): 119-132 (2004).

[0075] In certain phage display methods, repertoires of VH and VL genes are separately cloned by polymerase chain reaction (PCR) and recombined randomly in phage libraries, which can then be screened for antigen-binding phage as described in Winter et al., Ann. Rev. Immunol., 12: 433-455 (1994). Phage typically displays antibody fragments, either as scFv fragments or as Fab fragments. Libraries from immunized sources provide high-affinity antibodies to the immunogen without the requirement of constructing hybridomas. Alternatively, the naive repertoire can be cloned (e.g., from human) to provide a single source of antibodies to a wide range of non-self and also self-antigens without any immunization as described by Griffiths et al., EMBO J, 12: 725-734 (1993). Finally, naive libraries can also be made synthetically by cloning unrearranged V-gene segments from stem cells and using PCR primers containing random sequences to encode the highly variable CDR3 regions and to accomplish rearrangement in vitro, as described by Hoogenboom and Winter, J. Mol. Biol., 227: 381-388 (1992). Patent publications describing human antibody phage libraries include, for example, U.S. Pat. No. 5,750,373, and US Patent Publication Nos. 2005/0079574, 2005/0119455, 2005/0266000, 2007/0117126, 2007/0160598, 2007/0237764, 2007/0292936, and 2009/0002360. Antibodies or antibody fragments isolated from human antibody libraries are considered human antibodies or human antibody fragments herein.

[0076] Variants

[0077] In some embodiments, amino acid sequence variants of the antibodies provided herein are contemplated. For example, it may be desirable to improve the binding affinity and/or other biological properties of the antibody. Amino acid sequence variants of an antibody may be prepared by introducing appropriate modifications into the nucleotide sequence encoding the antibody or by peptide synthesis. Such modifications include, for example, deletions from, and/or insertions into and/or substitutions of residues within the amino acid sequences of the antibody. Any combination of deletion, insertion, and substitution can be made to arrive at the final construct, provided that the final construct possesses the desired characteristics, e.g., antigen binding.

[0078] Substitution, Insertion, and Deletion Variants

[0079] In some embodiments, antibody variants having one or more amino acid substitutions are provided. Sites of interest for substitutional mutagenesis include the HVRs and FRs. Conservative substitutions are defined herein. Amino acid substitutions may be introduced into an antibody of interest and the products screened for a desired activity, e.g., retained/improved antigen binding, decreased immunogenicity, or improved antibody-dependent cell-mediated cytotoxicity (ADCC) and complement-dependent cytotoxicity (CDC).

[0080] Accordingly, an antibody of the invention can comprise one or more conservative modifications of the CDRs, heavy chain variable region, or light variable regions described herein. A conservative modification or functional equivalent of a peptide, polypeptide, or protein disclosed in this invention refers to a polypeptide derivative of the peptide, polypeptide, or protein, e.g., a protein having one or more point mutations, insertions, deletions, truncations, a fusion protein, or a combination thereof. It substantially retains the activity of the parent peptide, polypeptide, or protein (such as those disclosed in this invention). In general, a conservative modification or functional equivalent is at least 60% (e.g., any number between 60% and 100%, inclusive, e.g., 60%, 70%, 75%, 80%, 85%, 90%, 95%, 96%, 97%, 98%, and 99%) identical to a parent. Accordingly, within the scope of this invention are heavy chain variable region or light variable regions having one or more point mutations, insertions, deletions, truncations, a fusion protein, or a combination thereof, as well as antibodies having the variant regions.

[0081] As used herein, the percent homology between two amino acid sequences is equivalent to the percent identity between the two sequences. The percent identity between the two sequences is a function of the number of identical positions shared by the sequences (i.e., % homology=# of identical positions/total # of positions×100), taking into account the number of gaps and the length of each gap, which need to be introduced for the optimal alignment of the two sequences. The comparison of sequences and determination of percent identity between two sequences can be accomplished using a mathematical algorithm, as described in the non-limiting examples below.

[0082] The percent identity between two amino acid sequences can be determined using the algorithm of E. Meyers and W. Miller (Comput. Appl. Biosci., 4:11-17 (1988)) which has been incorporated into the ALIGN program (version 2.0), using a PAM120 weight residue table, a gap length penalty of 12 and a gap penalty of 4. In addition, the percent identity between two amino acid sequences can be determined using the Needleman and Wunsch (J. Mol. Biol. 48:444-453 (1970)) algorithm, which has been incorporated into the GAP program in the GCG software package (available at www.gcg.com), using either a Blossum 62 matrix or a PAM250 matrix, and a gap weight of 16, 14, 12, 10, 8, 6, or 4 and a length weight of 1, 2, 3, 4, 5, or 6.

[0083] Additionally or alternatively, the protein sequences of the present invention can further be used as a “query sequence” to perform a search against public databases to, for example, identify related sequences. Such searches can be performed using the XBLAST program (version 2.0) of Altschul, et al. (1990) J. Mol. Biol. 215:403-10. BLAST protein searches can be performed with the XBLAST program, score=50, wordlength=3 to obtain amino acid sequences homologous to the antibody molecules of the invention. To obtain gapped alignments for comparison purposes, Gapped BLAST can be utilized as described in Altschul et al., (1997) Nucleic Acids Res. 25(17):3389-3402. When utilizing BLAST and Gapped BLAST programs, the default parameters of the respective programs (e.g., XBLAST and NBLAST) can be used. (See www.ncbi.nlm.nih.gov).

[0084] As used herein, the term “conservative modifications” refers to amino acid modifications that do not significantly affect or alter the binding characteristics of the antibody containing the amino acid sequence. Such conservative modifications include amino acid substitutions, additions, and deletions. Modifications can be introduced into an antibody of the invention by standard techniques known in the art, such as site-directed mutagenesis and PCR-mediated mutagenesis. Conservative amino acid substitutions are ones in which the amino acid residue is replaced with an amino acid residue having a similar side chain. Families of amino acid residues having similar side chains have been defined in the art. These families include: (i) amino acids with basic side chains (e.g., lysine, arginine, histidine), (ii) acidic side chains (e.g., aspartic acid, glutamic acid), (iii) uncharged polar side chains (e.g., glycine, asparagine, glutamine, serine, threonine, tyrosine, cysteine, tryptophan), (iv) nonpolar side chains (e.g., alanine, valine, leucine, isoleucine, proline, phenylalanine, methionine), (v) beta-branched side chains (e.g., threonine, valine, isoleucine), and (vi) aromatic side chains (e.g., tyrosine, phenylalanine, tryptophan, histidine).

[0085] Non-conservative substitutions will entail exchanging a member of one of these classes for another class.

[0086] An exemplary substitutional variant is an affinity matured antibody, which may be conveniently generated, e.g., using phage display-based affinity maturation techniques such as those described in, e.g., Hoogenboom et al., in Methods in Molecular Biology 178:1-37 (O'Brien et al., ed., Human Press, Totowa, N.J., (2001). Amino acid sequence insertions include amino- and/or carboxyl-terminal fusions ranging in length from one residue to polypeptides containing a hundred or more residues, as well as intrasequence insertions of single or multiple amino acid residues. Examples of terminal insertions include an antibody with an N-terminal methionyl residue. Other insertional variants of the antibody molecule include the fusion to the N- or C-terminus of the antibody to an enzyme (e.g., for ADEPT) or a polypeptide which increases the serum half-life of the antibody.

[0087] Glycosylation Variants

[0088] In some embodiments, an antibody provided herein is altered to increase or decrease the extent to which the antibody is glycosylated. Addition or deletion of glycosylation sites to an antibody may be conveniently accomplished by altering the amino acid sequence such that one or more glycosylation sites are created or removed.

[0089] For example, an aglycoslated antibody can be made (i.e., the antibody lacks glycosylation). Glycosylation can be altered to, for example, increase the affinity of the antibody for antigen. Such carbohydrate modifications can be accomplished by, for example, altering one or more sites of glycosylation within the antibody sequence. For example, one or more amino acid substitutions can be made that result in elimination of one or more variable region framework glycosylation sites to thereby eliminate glycosylation at that site. Such aglycosylation may increase the affinity of the antibody for antigen. Such an approach is described in further detail in U.S. Pat. Nos. 5,714,350 and 6,350,861 by Co et al.

[0090] Glycosylation of the constant region on N297 may be prevented by mutating the N297 residue to another residue, e.g., N297A, and/or by mutating an adjacent amino acid, e.g., 298 to thereby reduce glycosylation on N297.

[0091] Additionally or alternatively, an antibody can be made that has an altered type of glycosylation, such as a hypofucosylated antibody having reduced amounts of fucosyl residues or an antibody having increased bisecting GlcNac structures. Such altered glycosylation patterns have been demonstrated to increase the ADCC ability of antibodies. Such carbohydrate modifications can be accomplished by, for example, expressing the antibody in a host cell with altered glycosylation machinery. Cells with altered glycosylation machinery have been described in the art and can be used as host cells in which to express recombinant antibodies described herein to thereby produce an antibody with altered glycosylation. For example, EP 1,176,195 by Hanai et al. describes a cell line with a functionally disrupted FUT8 gene, which encodes a fucosyltransferase, such that antibodies expressed in such a cell line exhibit hypofucosylation. PCT Publication WO 03/035835 by Presta describes a variant Chinese Hamster Ovary cell line, Led 3 cells, with reduced ability to attach fucose to Asn(297)-linked carbohydrates, also resulting in hypofucosylation of antibodies expressed in that host cell (see also Shields, R. L. et al. (2002) J. Biol. Chem. 277:26733-26740). PCT Publication WO 99/54342 by Umana et al. describes cell lines engineered to express glycoprotein-modifying glycosyltransferases (e.g., beta(1,4)-N-acetylglucosaminyltransferase III (GnTIII)) such that antibodies expressed in the engineered cell lines exhibit increased bisecting GlcNac structures, which result in increased ADCC activity of the antibodies (see also Umana et al. (1999) Nat. Biotech. 17: 176-180).

[0092] Fc Region Variants

[0093] The variable regions of the antibody described herein can be linked (e.g., covalently linked or fused) to an Fc, e.g., an IgG1, IgG2, IgG3 or IgG4 Fc, which may be of any allotype or isoallotype, e.g., for IgG1: G1m, G1m1(a), G1m2(x), G1m3(f), G1m17(z); for IgG2: G2m, G2m23(n); for IgG3: G3m, G3m21(g1), G3m28(g5), G3 m11(b0), G3m5(b1), G3m13(b3), G3m14(b4), G3m10(b5), G3m15(s), G3m16(t), G3m6(c3), G3m24(c5), G3m26(u), G3m27(v); and for K: Km, Km1, Km2, Km3 (see, e.g., Jefferies et al. (2009) mAbs 1: 1). In some embodiments, the antibody variable regions described herein are linked to an Fe that binds to one or more activating Fc receptors (FcγI, Fcγlla or FcγIIIa), and thereby stimulate ADCC and may cause T cell depletion. In some embodiments, the antibody variable regions described herein are linked to an Fc that causes depletion.

[0094] In some embodiments, the antibody variable regions described herein may be linked to an Fc comprising one or more modifications, typically to alter one or more functional properties of the antibody, such as serum half-life, complement fixation, Fc receptor binding, and/or antigen-dependent cellular cytotoxicity. Furthermore, an antibody described herein may be chemically modified (e.g., one or more chemical moieties can be attached to the antibody) or be modified to alter its glycosylation, to alter one or more functional properties of the antibody. The numbering of residues in the Fc region is that of the EU index of Kabat.

[0095] The Fc region encompasses domains derived from the constant region of an immunoglobulin, preferably a human immunoglobulin, including a fragment, analog, variant, mutant or derivative of the constant region. Suitable immunoglobulins include IgG1, IgG2, IgG3, IgG4, and other classes such as IgA, IgD, IgE, and IgM. The constant region of an immunoglobulin is defined as a naturally-occurring or synthetically-produced polypeptide homologous to the immunoglobulin C-terminal region and can include a CH1 domain, a hinge, a CH2 domain, a CH3 domain, or a CH4 domain, separately or in combination. In some embodiments, an antibody of this invention has an Fc region other than that of a wild type IgA1. The antibody can have an Fc region from that of IgG (e.g., IgG1, IgG2, IgG3, and IgG4) or other classes such as IgA2, IgD, IgE, and IgM. The Fc can be a mutant form of IgA1.

[0096] The constant region of an immunoglobulin is responsible for many important antibody functions, including Fc receptor (FcR) binding and complement fixation. There are five major classes of heavy chain constant region, classified as IgA, IgG, IgD, IgE, IgM, each with characteristic effector functions designated by isotype. For example, IgG is separated into four subclasses known as IgG1, IgG2, IgG3, and IgG4.

[0097] Ig molecules interact with multiple classes of cellular receptors. For example, IgG molecules interact with three classes of Fcγ receptors (FcγR) specific for the IgG class of antibody, namely FcγRI, FcγRII, and FcγRIIL. The important sequences for the binding of IgG to the FcγR receptors have been reported to be located in the CH2 and CH3 domains. The serum half-life of an antibody is influenced by the ability of that antibody to bind to an FcR.

[0098] In some embodiments, the Fc region is a variant Fc region, e.g., an Fc sequence that has been modified (e.g., by amino acid substitution, deletion and/or insertion) relative to a parent Fc sequence (e.g., an unmodified Fc polypeptide that is subsequently modified to generate a variant), to provide desirable structural features and/or biological activity. For example, one may make modifications in the Fc region in order to generate an Fc variant that (a) has increased or decreased ADCC, (b) increased or decreased CDC, (c) has increased or decreased affinity for C1q and/or (d) has increased or decreased affinity for an Fc receptor relative to the parent Fc. Such Fc region variants will generally comprise at least one amino acid modification in the Fc region. Combining amino acid modifications is thought to be particularly desirable. For example, the variant Fc region may include two, three, four, five, or more substitutions therein, e.g., of the specific Fc region positions identified herein.

[0099] A variant Fc region may also comprise a sequence alteration wherein amino acids involved in disulfide bond formation are removed or replaced with other amino acids. Such removal may avoid reaction with other cysteine-containing proteins present in the host cell used to produce the antibodies described herein. Even when cysteine residues are removed, single chain Fc domains can still form a dimeric Fc domain that is held together non-covalently. In other embodiments, the Fc region may be modified to make it more compatible with a selected host cell. For example, one may remove the PA sequence near the N-terminus of a typical native Fc region, which may be recognized by a digestive enzyme in E. coli such as proline iminopeptidase. In other embodiments, one or more glycosylation sites within the Fc domain may be removed. Residues that are typically glycosylated (e.g., asparagine) may confer cytolytic response. Such residues may be deleted or substituted with unglycosylated residues (e.g., alanine). In other embodiments, sites involved in interaction with complement, such as the C1q binding site, may be removed from the Fc region. For example, one may delete or substitute the EKK sequence of human IgG1. In some embodiments, sites that affect binding to Fc receptors may be removed, preferably sites other than salvage receptor binding sites. In other embodiments, an Fc region may be modified to remove an ADCC site. ADCC sites are known in the art; see, for example, Molec. Immunol. 29 (5): 633-9 (1992) with regard to ADCC sites in IgG1. Specific examples of variant Fe domains are disclosed, for example, in WO 97/34631 and WO 96/32478.

[0100] In one embodiment, the hinge region of Fc is modified such that the number of cysteine residues in the hinge region is altered, e.g., increased or decreased. This approach is described further in U.S. Pat. No. 5,677,425 by Bodmer et al. The number of cysteine residues in the hinge region of Fc is altered to, for example, facilitate assembly of the light and heavy chains or to increase or decrease the stability of the antibody. In one embodiment, the Fc hinge region of an antibody is mutated to decrease the biological half-life of the antibody. More specifically, one or more amino acid mutations are introduced into the CH2-CH3 domain interface region of the Fc-hinge fragment such that the antibody has impaired Staphylococcal protein A (SpA) binding relative to native Fc-hinge domain SpA binding. This approach is described in further detail in U.S. Pat. No. 6,165,745 by Ward et al.

[0101] In yet other embodiments, the Fc region is altered by replacing at least one amino acid residue with a different amino acid residue to alter the effector function(s) of the antibody. For example, one or more amino acids selected from amino acid residues 234, 235, 236, 237, 297, 318, 320, and 322 can be replaced with a different amino acid residue such that the antibody has an altered affinity for an effector ligand but retains the antigen-binding ability of the parent antibody. The effector ligand to which affinity is altered can be, for example, an Fc receptor or the CI component of complement. This approach is described in further detail in U.S. Pat. Nos. 5,624,821 and 5,648,260, both by Winter et al.

[0102] In another example, one or more amino acids selected from amino acid residues 329, 331, and 322 can be replaced with a different amino acid residue such that the antibody has altered C1q binding and/or reduced or abolished CDC. This approach is described in further detail in U.S. Pat. No. 6,194,551 by Idusogie et al.

[0103] In another example, one or more amino acid residues within amino acid positions 231 and 239 are altered to thereby alter the ability of the antibody to fix complement. This approach is described further in PCT Publication WO 94/29351 by Bodmer et al.

[0104] In yet another example, the Fc region may be modified to increase ADCC and/or to increase the affinity for an Fcγ receptor by modifying one or more amino acids at the following positions: 234, 235, 236, 238, 239, 240, 241, 243, 244, 245, 247, 248, 249, 252, 254, 255, 256, 258, 262, 263, 264, 265, 267, 268, 269, 270, 272, 276, 278, 280, 283, 285, 286, 289, 290, 292, 293, 294, 295, 296, 298, 299, 301, 303, 305, 307, 309, 312, 313, 315, 320, 322, 324, 325, 326, 327, 329, 330, 331, 332, 333, 334, 335, 337, 338, 340, 360, 373, 376, 378, 382, 388, 389, 398, 414, 416, 419, 430, 433, 434, 435, 436, 437, 438 or 439. Exemplary substitutions include 236A, 239D, 239E, 268D, 267E, 268E, 268F, 324T, 332D, and 332E. Exemplary variants include 239D/332E, 236A/332E, 236A/239D/332E, 268F/324T, 267E/268F, 267E/324T, and 267E/268F7324T. Other modifications for enhancing FcγR and complement interactions include but are not limited to substitutions 298A, 333A, 334A, 326A, 2471, 339D, 339Q, 280H, 290S, 298D, 298V, 243L, 292P, 300L, 396L, 305I, and 396L. These and other modifications are reviewed in Strohl, 2009, Current Opinion in Biotechnology 20:685-691.

[0105] Fc modifications that increase binding to an Fcγ receptor include amino acid modifications at any one or more of amino acid positions 238, 239, 248, 249, 252, 254, 255, 256, 258, 265, 267, 268, 269, 270, 272, 279, 280, 283, 285, 298, 289, 290, 292, 293, 294, 295, 296, 298, 301, 303, 305, 307, 312, 315, 324, 327, 329, 330, 335, 337, 3338, 340, 360, 373, 376, 379, 382, 388, 389, 398, 414, 416, 419, 430, 434, 435, 437, 438 or 439 of the Fc region, wherein the numbering of the residues in the Fc region is that of the EU index as in abat (WO00/42072).

[0106] Other Fc modifications that can be made to Fcs are those for reducing or ablating binding to FcγR and/or complement proteins, thereby reducing or ablating Fc-mediated effector functions such as ADCC, antibody-dependent cellular phagocytosis (ADCP), and CDC. Exemplary modifications include but are not limited to substitutions, insertions, and deletions at positions 234, 235, 236, 237, 267, 269, 325, and 328, wherein numbering is according to the EU index. Exemplary substitutions include but are not limited to 234G, 235G, 236R, 237K, 267R, 269R, 325L, and 328R, wherein numbering is according to the EU index. An Fc variant may comprise 236R/328R. Other modifications for reducing FcγR and complement interactions include substitutions 297A, 234A, 235A, 237A, 318A, 228P, 236E, 268Q, 309L, 330S, 331S, 220S, 226S, 229S, 238S, 233P, and 234V, as well as removal of the glycosylation at position 297 by mutational or enzymatic means or by production in organisms such as bacteria that do not glycosylate proteins. These and other modifications are reviewed in Strohl, 2009, Current Opinion in Biotechnology 20:685-691.

[0107] Optionally, the Fc region may comprise a non-naturally occurring amino acid residue at additional and/or alternative positions known to one skilled in the art (see, e.g., U.S. Pat. Nos. 5,624,821; 6,277,375; 6,737,056; 6,194,551; 7,317,091; 8,101,720; WO00/42072; WO01/58957; WO02/06919; WO04/016750; WO04/029207; WO04/035752; WO04/074455; WO04/099249; WO04/063351; WO05/070963; WO05/040217, WO05/092925 and WO06/020114).

[0108] Fc variants that enhance affinity for an inhibitory receptor FcγRIIb may also be used. Such variants may provide an Fc fusion protein with immune-modulatory activities related to FcγRIIb cells, including, for example, B cells and monocytes. In one embodiment, the Fc variants provide selectively enhanced affinity to FcγRIIb relative to one or more activating receptors. Modifications for altering binding to FcγRIIb include one or more modifications at a position selected from the group consisting of 234, 235, 236, 237, 239, 266, 267, 268, 325, 326, 327, 328, and 332, according to the EU index. Exemplary substitutions for enhancing FcγRIIb affinity include but are not limited to 234D, 234E, 234F, 234W, 235D, 235F, 235R, 235Y, 236D, 236N, 237D, 237N, 239D, 239E, 266M, 267D, 267E, 268D, 268E, 327D, 327E, 328F, 328W, 328Y, and 332E. Exemplary substitutions include 235Y, 236D, 239D, 266M, 267E, 268D, 268E, 328F, 328W, and 328Y. Other Fc variants for enhancing binding to FcγRllb include 235Y/267E, 236D/267E, 239D/268D, 239D/267E, 267E/268D, 267E/268E, and 267E/328F.

[0109] The affinities and binding properties of an Fc region for its ligand may be determined by a variety of in vitro assay methods (biochemical or immunological based assays) known in the art, including, but not limited to, equilibrium methods (e.g., ELISA, or radioimmunoassay), or kinetics (e.g., BIACORE analysis), and other methods such as indirect binding assays, competitive inhibition assays, fluorescence resonance energy transfer (FRET), gel electrophoresis and chromatography (e.g., gel filtration). These and other methods may utilize a label on one or more of the components being examined and/or employ a variety of detection methods, including, but not limited to, chromogenic, fluorescent, luminescent, or isotopic labels. A detailed description of binding affinities and kinetics can be found in Paul, W. E., ed., Fundamental Immunology, 4th Ed., Lippincott-Raven, Philadelphia (1999), which focuses on antibody-immunogen interactions.

[0110] In some embodiments, the antibody is modified to increase its biological half-life. Various approaches are possible. For example, this may be done by increasing the binding affinity of the Fc region for FcRn. For example, one or more of the following residues can be mutated: 252, 254, 256, 433, 435, 436, as described in U.S. Pat. No. 6,277,375. Specific exemplary substitutions include one or more of the following: T252L, T254S, and/or T256F. Alternatively, to increase the biological half-life, the antibody can be altered within the CH1 or CL region to contain a salvage receptor binding epitope taken from two loops of a CH2 domain of an Fc region of an IgG, as described in U.S. Pat. Nos. 5,869,046 and 6,121,022 by Presta et al. Other exemplary variants that increase binding to FcRn and/or improve pharmacokinetic properties include substitutions at positions 259, 308, 428, and 434, including for example 259I, 308F, 428L, 428M, 434S, 434H, 434F, 434Y, and 434M. Other variants that increase Fc binding to FcRn include: 250E, 250Q, 428L, 428F, 250Q/428L (Hinton et al., 2004, J. Biol. Chem. 279(8): 6213-6216, Hinton et al. 2006 Journal of Immunology 176:346-356), 256A, 272A, 286A, 305A, 307A, 307Q, 311A, 312A, 376A, 378Q, 380A, 382A, 434A (Shields et al, Journal of Biological Chemistry, 2001, 276(9):6591-6604), 252F, 252T, 252Y, 252W, 254T, 256S, 256R, 256Q, 256E, 256D, 256T, 309P, 311S, 433R, 433S, 4331, 433P, 433Q, 434H, 434F, 434Y, 252Y/254T/256E, 433K/434F/436H, 308T/309P/311S (Dall Acqua et al. Journal of Immunology, 2002, 169:5171-5180, Dall'Acqua et al., 2006, Journal of Biological Chemistry 281:23514-23524). Other modifications for modulating FcRn binding are described in Yeung et al., 2010, J Immunol, 182:7663-7671. In some embodiments, hybrid IgG isotypes with particular biological characteristics may be used. For example, an IgG1/IgG3 hybrid variant may be constructed by substituting IgG 1 positions in the CH2 and/or CH3 region with the amino acids from IgG3 at positions where the two isotypes differ. Thus a hybrid variant IgG antibody may be constructed that comprises one or more substitutions, e.g., 274Q, 276K, 300F, 339T, 356E, 358M, 384S, 392N, 397M, 422I, 435R, and 436F. In other embodiments described herein, an IgG1/IgG2 hybrid variant may be constructed by substituting IgG2 positions in the CH2 and/or CH3 region with amino acids from IgG1 at positions where the two isotypes differ. Thus a hybrid variant IgG antibody may be constructed chat comprises one or more substitutions, e.g., one or more of the following amino acid substitutions: 233E, 234L, 235L, 236G (referring to an insertion of a glycine at position 236), and 321 h.

[0111] Moreover, the binding sites on human IgG1 for FcγRl, FcγRII, FcγRIII, and FcRn have been mapped, and variants with improved binding have been described (see Shields, R. L. et al. (2001) J. Biol. Chem. 276:6591-6604). Specific mutations at positions 256, 290, 298, 333, 334, and 339 were shown to improve binding to FcγRIII. Additionally, the following combination mutants were shown to improve FcγRIII binding: T256A/S298A, S298A/E333A, S298A/K224A, and S298A/E333A/K334A, which has been shown to exhibit enhanced FcγRIIIa binding and ADCC activity (Shields et al., 2001). Other IgG1 variants with strongly enhanced binding to FcγRIIIa have been identified, including variants with S239D/I332E and S239D/I332E/A330L mutations which showed the greatest increase in affinity for FcγRIIIa, a decrease in FcγRIIb binding, and strong cytotoxic activity in cynomolgus monkeys (Lazar et al., 2006). Introduction of the triple mutations into antibodies such as alemtuzumab (CD52-specific), trastuzumab (HER2/neu-specific), rituximab (CD20-specific), and cetuximab (EGFR-specific) translated into greatly enhanced ADCC activity in vitro, and the S239D/I332E variant showed an enhanced capacity to deplete B cells in monkeys (Lazar et al., 2006). In addition, IgG1 mutants containing L235V, F243L, R292P, Y300L and P396L mutations which exhibited enhanced binding to FcγRIIIa and concomitantly enhanced ADCC activity in transgenic mice expressing human FcγRIIIa in models of B cell malignancies and breast cancer have been identified (Stavenhagen et al., 2007; Nordstrom et al., 2011). Other Fc mutants that may be used include: S298A/E333A/L334A, S239D/I332E, S239D/I332E/A330L, L235V/F243L/R292P/Y300L/P396L, and M428L/N434S.

[0112] In some embodiments, an Fc is chosen that has reduced binding to FcγRs. An exemplary Fc, e.g., IgG1 Fc, with reduced FcγR binding, comprises the following three amino acid substitutions: L234A, L235E, and G237A. In some embodiments, an Fc is chosen that has reduced complement fixation. An exemplary Fc, e.g., IgG1 Fc, with reduced complement fixation, has the following two amino acid substitutions: A330S and P331S. In some embodiments, an Fc is chosen that has essentially no effector function, i.e., it has reduced binding to FcγRs and reduced complement fixation. An exemplary Fc, e.g., IgG1 Fc, that is effectorless, comprises the following five mutations: L234A, L235E, G237A, A330S, and P331S. When using an IgG4 constant domain, it is usually preferable to include the substitution S228P, which mimics the hinge sequence in IgG1 and thereby stabilizes IgG4 molecules.

[0113] Multivalent Antibodies

[0114] In one embodiment, the antibodies of the invention may be monovalent or multivalent (e.g., bivalent, trivalent, etc.). As used herein, the term “valency” refers to the number of potential target binding sites associated with an antibody. Each target binding site specifically binds one target molecule or specific position or locus on a target molecule. When an antibody is monovalent, each binding site of the molecule will specifically bind to a single antigen position or epitope. When an antibody comprises more than one target binding site (multivalent), each target binding site may specifically bind the same or different molecules (e.g., may bind to different ligands or different antigens, or different epitopes or positions on the same antigen). See, for example, U.S.P.N. 2009/0130105. In each case, at least one of the binding sites will comprise an epitope, motif or domain associated with a DLL3 isoform.

[0115] In one embodiment, the antibodies are bispecific antibodies in which the two chains have different specificities, as described in Millstein et al., 1983, Nature, 305:537-539. Other embodiments include antibodies with additional specificities such as trispecific antibodies. Other more sophisticated compatible multispecific constructs and methods of their fabrication are set forth in U.S.P.N. 2009/0155255, as well as WO 94/04690; Suresh et al., 1986, Methods in Enzymology, 121:210; and WO96/27011.

[0116] As stated above, multivalent antibodies may immunospecifically bind to different epitopes of the desired target molecule or may immunospecifically bind to both the target molecule as well as a heterologous epitope, such as a heterologous polypeptide or solid support material. In some embodiments, the multivalent antibodies may include bispecific antibodies or trispecific antibodies. Bispecific antibodies also include cross-linked or “heteroconjugate” antibodies. For example, one of the antibodies in the heteroconjugate can be coupled to avidin, the other to biotin. Such antibodies have, for example, been proposed to target immune system cells to unwanted cells (U.S. Pat. No. 4,676,980) and for treatment of HIV infection (WO 91/00360, WO 92/200373, and EP 03089). Heteroconjugate antibodies may be made using any convenient cross-linking methods. Suitable cross-linking agents are well known in the art and are disclosed in U.S. Pat. No. 4,676,980, along with a number of cross-linking techniques.

[0117] In some embodiments, antibody variable domains with the desired binding specificities (antibody-antigen combining sites) are fused to immunoglobulin constant domain sequences, such as an immunoglobulin heavy chain constant domain comprising at least part of the hinge, CH2, and/or CH3 regions, using methods well known to those of ordinary skill in the art.

[0118] Antibody Derivatives

[0119] An antibody provided herein may be further modified to contain additional nonproteinaceous moieties that are known in the art and readily available. The moieties suitable for derivatization of the antibody include but are not limited to water-soluble polymers.

[0120] Non-limiting examples of water-soluble polymers include, but are not limited to, PEG, copolymers of ethylene glycol/propylene glycol, carboxymethylcellulose, dextran, polyvinyl alcohol, polyvinyl pyrrolidone, poly-1,3-dioxolane, poly-1,3,6-trioxane, ethylene/maleic anhydride copolymer, polyaminoacids (either homopolymers or random copolymers), and dextran or poly(n-vinyl pyrrolidone)polyethylene glycol, propropylene glycol homopolymers, polypropylene oxide/ethylene oxide co-polymers, polyoxyethylated polyols (e.g., glycerol), polyvinyl alcohol, and mixtures thereof. Polyethylene glycol propionaldehyde may have advantages in manufacturing due to its stability in water. The polymer may be of any molecular weight and may be branched or unbranched. The number of polymers attached to the antibody may vary, and if more than one polymer is attached, they can be the same or different molecules. In general, the number and/or type of polymers used for derivatization can be determined based on considerations including, but not limited to, the particular properties or functions of the antibody to be improved, whether the antibody derivative will be used in a therapy under defined conditions, etc.

[0121] In another embodiment, conjugates of an antibody and nonproteinaceous moiety that may be selectively heated by exposure to radiation are provided. In one embodiment, the nonproteinaceous moiety is a carbon nanotube (Kam et al., Proc. Natl. Acad. Sci. USA 102: 11600-11605 (2005)). The radiation may be of any wavelength and includes, but is not limited to, wavelengths that do not harm ordinary cells, but which heat the nonproteinaceous moiety to a temperature at which cells proximal to the antibody-nonproteinaceous moiety are killed.

[0122] Another modification of the antibodies described herein is pegylation. An antibody can be pegylated to, for example, increase the biological (e.g., serum) half-life of the antibody. To pegylate an antibody, the antibody, or fragment thereof, typically is reacted with PEG, such as a reactive ester or aldehyde derivative of PEG, under conditions in which one or more PEG groups become attached to the antibody or antibody fragment. Preferably, the pegylation is carried out via an acylation reaction or an alkylation reaction with a reactive PEG molecule (or an analogous reactive water-soluble polymer). As used herein, the term “polyethylene glycol” is intended to encompass any of the forms of PEG that have been used to derivatize other proteins, such as mono (CI-CIO) alkoxy- or aryloxy-polyethylene glycol or polyethylene glycol-maleimide. In some embodiments, the antibody to be pegylated is an aglycosylated antibody. Methods for pegylating proteins are known in the art and can be applied to the antibodies described herein. See, for example, EP 0 154 316 by Nishimura et al. and EP0401384 by Ishikawa et al.

[0123] The present invention also encompasses a human monoclonal antibody described herein conjugated to a therapeutic agent, a polymer, a detectable label or enzyme. In one embodiment, the therapeutic agent is a cytotoxic agent. In one embodiment, the polymer is PEG.

[0124] Nucleic Acids, Expression Cassettes, and Vectors

[0125] The present invention provides isolated nucleic acid segments that encode the polypeptides, peptide fragments, and coupled proteins of the invention. The nucleic acid segments of the invention also include segments that encode for the same amino acids due to the degeneracy of the genetic code. For example, the amino acid threonine is encoded by ACU, ACC, ACA, and ACG and is therefore degenerate. It is intended that the invention includes all variations of the polynucleotide segments that encode for the same amino acids. Such mutations are known in the art (Watson et al., Molecular Biology of the Gene, Benjamin Cummings 1987). Mutations also include alteration of a nucleic acid segment to encode for conservative amino acid changes, for example, the substitution of leucine for isoleucine and so forth. Such mutations are also known in the art. Thus, the genes and nucleotide sequences of the invention include both the naturally occurring sequences as well as mutant forms.

[0126] The nucleic acid segments of the invention may be contained within a vector. A vector may include, but is not limited to, any plasmid, phagemid, F-factor, virus, cosmid, or phage in a double- or single-stranded linear or circular form which may or may not be self transmissible or mobilizable. The vector can also transform a prokaryotic or eukaryotic host either by integration into the cellular genome or exist extra-chromosomally (e.g., autonomous replicating plasmid with an origin of replication).

[0127] The nucleic acid segment in the vector can be under the control of, and operably linked to, an appropriate promoter or other regulatory elements for transcription in vitro or in a host cell, such as a eukaryotic cell, or a microbe, e.g., bacteria. The vector may be a shuttle vector that functions in multiple hosts. The vector may also be a cloning vector that typically contains one or a small number of restriction endonuclease recognition sites at which foreign DNA sequences can be inserted in a determinable fashion. Such insertion can occur without loss of essential biological function of the cloning vector. A cloning vector may also contain a marker gene that is suitable for use in the identification and selection of cells transformed with the cloning vector. Examples of marker genes are tetracycline resistance or ampicillin resistance. Many cloning vectors are commercially available (Stratagene, New England Biolabs, Clonetech).

[0128] The nucleic acid segments of the invention may also be inserted into an expression vector. Typically an expression vector contains prokaryotic DNA elements coding for a bacterial replication origin and an antibiotic resistance gene to provide for the amplification and selection of the expression vector in a bacterial host; regulatory elements that control initiation of transcription such as a promoter; and DNA elements that control the processing of transcripts such as introns, or a transcription termination/polyadenylation sequence.

[0129] Methods to introduce nucleic acid segment into a vector are available in the art (Sambrook et al., Molecular Cloning: A Laboratory Manual, 3rd edition, Cold Spring Harbor Press, Cold Spring Harbor, N.Y. (2001)). Briefly, a vector into which a nucleic acid segment is to be inserted is treated with one or more restriction enzymes (restriction endonuclease) to produce a linearized vector having a blunt end, a “sticky” end with a 5′ or a 3′ overhang, or any combination of the above. The vector may also be treated with a restriction enzyme and subsequently treated with another modifying enzyme, such as a polymerase, an exonuclease, a phosphatase or a kinase, to create a linearized vector that has characteristics useful for ligation of a nucleic acid segment into the vector. The nucleic acid segment that is to be inserted into the vector is treated with one or more restriction enzymes to create a linearized segment having a blunt end, a “sticky” end with a 5′ or a 3′ overhang, or any combination of the above. The nucleic acid segment may also be treated with a restriction enzyme and subsequently treated with another DNA modifying enzyme. Such DNA modifying enzymes include, but are not limited to, polymerase, exonuclease, phosphatase or a kinase, to create a nucleic acid segment that has characteristics useful for ligation of a nucleic acid segment into the vector.

[0130] The treated vector and nucleic acid segment are then ligated together to form a construct containing a nucleic acid segment according to methods available in the art (Sambrook et al., Molecular Cloning: A Laboratory Manual, 3rd edition, Cold Spring Harbor Press, Cold Spring Harbor, N.Y. (2001)). For example, the treated nucleic acid fragment and the treated vector are combined in the presence of a suitable buffer and ligase. The mixture is then incubated under appropriate conditions to allow the ligase to ligate the nucleic acid fragment into the vector.

[0131] The disclosure also provides an expression cassette which contains a nucleic acid sequence capable of directing expression of a particular nucleic acid segment of the invention, either in vitro or in a host cell. Also, a nucleic acid segment of the invention may be inserted into the expression cassette such that an anti-sense message is produced. The expression cassette is an isolatable unit such that the expression cassette may be in linear form and functional for in vitro transcription and translation assays. The materials and procedures to conduct these assays are commercially available from Promega Corp. (Madison, Wis.). For example, an in vitro transcript may be produced by placing a nucleic acid sequence under the control of a T7 promoter and then using T7 RNA polymerase to produce an in vitro transcript. This transcript may then be translated in vitro through use of a rabbit reticulocyte lysate. Alternatively, the expression cassette can be incorporated into a vector allowing for replication and amplification of the expression cassette within a host cell or also in vitro transcription and translation of a nucleic acid segment.

[0132] Such an expression cassette may contain one or a plurality of restriction sites allowing for placement of the nucleic acid segment under the regulation of a regulatory sequence. The expression cassette can also contain a termination signal operably linked to the nucleic acid segment as well as regulatory sequences required for proper translation of the nucleic acid segment. The expression cassette containing the nucleic acid segment may be chimeric, meaning that at least one of its components is heterologous with respect to at least one of its other components. The expression cassette may also be one that is naturally occurring but has been obtained in a recombinant form useful for heterologous expression. Expression of the nucleic acid segment in the expression cassette may be under the control of a constitutive promoter or an inducible promoter, which initiates transcription only when the host cell is exposed to some particular external stimulus.

[0133] The expression cassette may include in the 5′-3′ direction of transcription, a transcriptional and translational initiation region, a nucleic acid segment, and a transcriptional and translational termination region functional in vivo and/or in vitro. The termination region may be native with the transcriptional initiation region, may be native with the nucleic acid segment, or may be derived from another source.

[0134] The regulatory sequence can be a polynucleotide sequence located upstream (5′ non-coding sequences), within, or downstream (3′ non-coding sequences) of a coding sequence, and which influences the transcription, RNA processing or stability, or translation of the associated coding sequence. Regulatory sequences can include, but are not limited to, enhancers, promoters, repressor binding sites, translation leader sequences, introns, and polyadenylation signal sequences. They may include natural and synthetic sequences as well as sequences, which may be a combination of synthetic and natural sequences. While regulatory sequences are not limited to promoters, some useful regulatory sequences include constitutive promoters, inducible promoters, regulated promoters, tissue-specific promoters, viral promoters, and synthetic promoters.

[0135] A promoter is a nucleotide sequence that controls the expression of the coding sequence by providing the recognition for RNA polymerase and other factors required for proper transcription. A promoter includes a minimal promoter, consisting only of all basal elements needed for transcription initiation, such as a TATA-box and/or initiator that is a short DNA sequence comprised of a TATA-box and other sequences that serve to specify the site of transcription initiation, to which regulatory elements are added for control of expression. A promoter may be derived entirely from a native gene, or be composed of different elements derived from different promoters found in nature, or even be comprised of synthetic DNA segments. A promoter may contain DNA sequences that are involved in the binding of protein factors that control the effectiveness of transcription initiation in response to physiological or developmental conditions.

[0136] The disclosure also provides a construct containing a vector and an expression cassette. The vector may be selected from, but not limited to, any vector previously described. Into this vector may be inserted an expression cassette through methods known in the art and previously described (Sambrook et al., Molecular Cloning: A Laboratory Manual, 3rd edition, Cold Spring Harbor Press, Cold Spring Harbor, N.Y. (2001)). In one embodiment, the regulatory sequences of the expression cassette may be derived from a source other than the vector into which the expression cassette is inserted. In another embodiment, a construct containing a vector and an expression cassette is formed upon insertion of a nucleic acid segment of the invention into a vector that itself contains regulatory sequences. Thus, an expression cassette is formed upon insertion of the nucleic acid segment into the vector. Vectors containing regulatory sequences are available commercially, and methods for their use are known in the art (Clonetech, Promega, Stratagene).

[0137] In another aspect, this disclosure also provides (i) a nucleic acid molecule encoding a polypeptide chain of the antibody or antigen-binding fragment thereof described above; (ii) a vector comprising the nucleic acid molecule as described; and (iii) a cultured host cell comprising the vector as described.

[0138] Also provided is a method for producing a polypeptide (e.g., anti-TBEV antibody), comprising: (a) obtaining the cultured host cell as described; (b) culturing the cultured host cell in a medium under conditions permitting expression of a polypeptide encoded by the vector and assembling of an antibody or fragment thereof, and (c) purifying the antibody or fragment from the cultured cell or the medium of the cell.

[0139] Methods of Production

[0140] Antibodies may be produced using recombinant methods and compositions, e.g., as described in U.S. Pat. No. 4,816,567. In one embodiment, an isolated nucleic acid encoding an antibody described herein is provided. Such nucleic acid may encode an amino acid sequence comprising the VL and/or an amino acid sequence comprising the VH of the antibody (e.g., the light and/or heavy chains of the antibody). In a further embodiment, one or more vectors (e.g., expression vectors) comprising such nucleic acid are provided. In a further embodiment, a host cell comprising such nucleic acid is provided. In one such embodiment, a host cell comprises (e.g., has been transformed with): (1) a vector comprising a nucleic acid that encodes an amino acid sequence comprising the VL of the antibody and an amino acid sequence comprising the VH of the antibody, or (2) a first vector comprising a nucleic acid that encodes an amino acid sequence comprising the VL of the antibody and a second vector comprising a nucleic acid that encodes an amino acid sequence comprising the VH of the antibody. In one embodiment, the host cell is eukaryotic, e.g., a Chinese Hamster Ovary (CHO) cell or lymphoid cell (e.g., Y0, NS0, Sp20 cell). In one embodiment, a method of making an antibody is provided, wherein the method comprises culturing a host cell comprising a nucleic acid encoding the antibody, as provided above, under conditions suitable for expression of the antibody, and optionally recovering the antibody from the host cell (or host cell culture medium).

[0141] For recombinant production of an antibody, a nucleic acid encoding an antibody, e.g., as described above, is isolated and inserted into one or more vectors for further cloning and/or expression in a host cell. Such nucleic acid may be readily isolated and sequenced using conventional procedures (e.g., by using oligonucleotide probes that are capable of binding specifically to genes encoding the heavy and light chains of the antibody).

[0142] A described herein, such as in the examples, RNA encoding the disclosed antibodies can be isolated from convalescent or vaccinated donors and reverse transcribed into cDNA. The cDNA can then be modified through recombinant DNA methods and cloned into one or more vectors for expression in a host cell. The recombinantly expressed monoclonal antibodies can be isolated and subject to further purification. At least due to one or more of the reverse transcription, PCR amplification, and cloning processes, each of the recombinantly made and expressed antibodies possesses at least one or more non-naturally occurring changes or mutations in the heavy chain variable region, light chain variable region, or constant region, distinguishing it from an occurring natural antibody. These mutations render the antibodies disclosed herein markedly different from any naturally occurring counterparts. Accordingly, the antibodies disclosed herein are non-naturally occurring.

[0143] Suitable host cells for cloning or expression of antibody-encoding vectors include prokaryotic or eukaryotic cells described herein. For example, antibodies may be produced in bacteria, in particular when glycosylation and Fc effector function are not needed. For expression of antibody fragments and polypeptides in bacteria, see, e.g., U.S. Pat. Nos. 5,648,237, 5,789,199, and 5,840,523. (See also Charlton, Methods in Molecular Biology, Vol. 248 (B. K. C. Lo, ed., Humana Press, Totowa, N.J., 2003), pp. 245-254, describing expression of antibody fragments in E. coli.) After expression, the antibody may be isolated from the bacterial cell paste in a soluble fraction and can be further purified.

[0144] In addition to prokaryotes, eukaryotic microbes such as filamentous fungi or yeast are suitable cloning or expression hosts for antibody-encoding vectors, including fungi and yeast strains whose glycosylation pathways have been “humanized,” resulting in the production of an antibody with a partially or fully human glycosylation pattern. See Gerngross, Nat. Biotech. 22:1409-1414 (2004), and Li et al., Nat. Biotech. 24:210-215 (2006).

[0145] Suitable host cells for the expression of glycosylated antibody are also derived from multicellular organisms (invertebrates and vertebrates). Examples of invertebrate cells include plant and insect cells. Numerous baculoviral strains have been identified, which may be used in conjunction with insect cells, particularly for transfection of Spodoptera frugiperda cells.

[0146] Plant cell cultures can also be utilized as hosts. See, e.g., U.S. Pat. Nos. 5,959,177, 6,040,498, 6,420,548, 7,125,978, and 6,417,429 (describing PLANTIBODIES technology for producing antibodies in transgenic plants).

[0147] Vertebrate cells may also be used as hosts. For example, mammalian cell lines that are adapted to grow in suspension may be useful. Other examples of useful mammalian host cell lines are monkey kidney CV1 line transformed by SV40 (COS-7); human embryonic kidney line (293 or 293 cells as described, e.g., in Graham et al., J. Gen Virol. 36:59 (1977)); baby hamster kidney cells (BHK); mouse sertoli cells (TM4 cells as described, e.g., in Mather, Biol. Reprod. 23:243-251 (1980)); monkey kidney cells (CV1); African green monkey kidney cells (VERO-76); human cervical carcinoma cells (HELA); canine kidney cells (MDCK; buffalo rat liver cells (BRL 3A); human lung cells (W138); human liver cells (Hep G2); mouse mammary tumor (MMT 060562); TRI cells, as described, e.g., in Mather et al., Annals N.Y. Acad. Sci. 383:44-68 (1982); MRC 5 cells; and FS4 cells. Other useful mammalian host cell lines include CHO cells, including DHFR-CHO cells (Urlaub et al., Proc. Natl. Acad. Sci. USA 77:4216 (1980)); and myeloma cell lines such as Y0, NS0, and Sp2/0. For a review of certain mammalian host cell lines suitable for antibody production, see, e.g., Yazaki and Wu, Methods in Molecular Biology, Vol. 248 (B. K. C. Lo, ed., Humana Press, Totowa, N.J.), pp. 255-268 (2003).

### B. Compositions and Formulations

[0148] The antibodies of this invention represent an excellent way for the development of antiviral therapies either alone or in antibody cocktails with additional anti-TBEV antibodies for the treatment of tick-borne flavivirus (e.g., TBEV) infection in humans.

[0149] In another aspect, the present invention provides a pharmaceutical composition comprising the antibodies of the present invention described herein formulated together with a pharmaceutically acceptable carrier. The composition may optionally contain one or more additional pharmaceutically active ingredients, such as another antibody or a therapeutic agent.

[0150] In some embodiments, the pharmaceutical comprises two or more of the antibody or antigen-binding fragment thereof described above, such as any combinations of the antibody or antigen-binding fragment thereof comprising a heavy chain and a light chain that comprise the respective amino acid sequences described herein.

[0151] In some example, each antibody or antigen-binding fragment thereof comprises (i) HCDRs1-3 and LCDRs1-3 of an antibody selected from those in Tables 2A-I, 3, and 4, or (ii) a heavy chain variable region and a light chain variable region that comprise the respective amino acid sequences of an antibody selected from those in Tables 2A-I, 3, and 4.

[0152] The pharmaceutical compositions of the invention also can be administered in a combination therapy with, for example, another immune-stimulatory agent, an antiviral agent, or a vaccine, etc. In some embodiments, a composition comprises an antibody of this invention at a concentration of at least 1 mg/ml, 5 mg/ml, 10 mg/ml, 50 mg/ml, 100 mg/ml, 150 mg/ml, 200 mg/ml, 1-300 mg/ml, or 100-300 mg/ml.

[0153] In some embodiments, the second therapeutic agent comprises an anti-inflammatory drug or an antiviral compound. In some embodiments, the antiviral compound comprises: a nucleoside analog, a peptoid, an oligopeptide, a polypeptide, a protease inhibitor, a 3C-like protease inhibitor, a papain-like protease inhibitor, or an inhibitor of an RNA dependent RNA polymerase. In some embodiments, the antiviral compound may include: acyclovir, gancyclovir, vidarabine, foscarnet, cidofovir, amantadine, ribavirin, trifluorothymidine, zidovudine, didanosine, zalcitabine or an interferon. In some embodiments, the interferon is an interferon-α or an interferon-β.

[0154] Also within the scope of this disclosure is use of the pharmaceutical composition in the preparation of a medicament for the diagnosis, prophylaxis, treatment, or combination thereof of a condition resulting from infection caused by a tick-borne flavivirus (e.g., TBEV).

[0155] The pharmaceutical composition can comprise any number of excipients. Excipients that can be used include carriers, surface-active agents, thickening or emulsifying agents, solid binders, dispersion or suspension aids, solubilizers, colorants, flavoring agents, coatings, disintegrating agents, lubricants, sweeteners, preservatives, isotonic agents, and combinations thereof. The selection and use of suitable excipients is taught in Gennaro, ed., Remington: The Science and Practice of Pharmacy, 20th Ed. (Lippincott Williams & Wilkins 2003), the disclosure of which is incorporated herein by reference.

[0156] Preferably, a pharmaceutical composition is suitable for intravenous, intramuscular, subcutaneous, parenteral, spinal or epidermal administration (e.g., by injection or infusion). Depending on the route of administration, the active compound can be coated in a material to protect it from the action of acids and other natural conditions that may inactivate it. The phrase “parenteral administration” as used herein means modes of administration other than enteral and topical administration, usually by injection, and includes, without limitation, intravenous, intramuscular, intraarterial, intrathecal, intracapsular, intraorbital, intracardiac, intradermal, intraperitoneal, transtracheal, subcutaneous, subcuticular, intraarticular, subcapsular, subarachnoid, intraspinal, epidural and intrasternal injection and infusion. Alternatively, an antibody of the present invention described herein can be administered via a non-parenteral route, such as a topical, epidermal or mucosal route of administration, e.g., intranasally, orally, vaginally, rectally, sublingually or topically.

[0157] The pharmaceutical compositions of the invention may be prepared in many forms that include tablets, hard or soft gelatin capsules, aqueous solutions, suspensions, and liposomes and other slow-release formulations, such as shaped polymeric gels. An oral dosage form may be formulated such that the antibody is released into the intestine after passing through the stomach. Such formulations are described in U.S. Pat. No. 6,306,434 and in the references contained therein.

[0158] Oral liquid pharmaceutical compositions may be in the form of, for example, aqueous or oily suspensions, solutions, emulsions, syrups or elixirs, or may be presented as a dry product for constitution with water or other suitable vehicle before use. Such liquid pharmaceutical compositions may contain conventional additives such as suspending agents, emulsifying agents, non-aqueous vehicles (which may include edible oils), or preservatives.

[0159] An antibody can be formulated for parenteral administration (e.g., by injection, for example, bolus injection or continuous infusion) and may be presented in unit dosage form in ampules, prefilled syringes, small volume infusion containers or multi-dose containers with an added preservative. The pharmaceutical compositions may take such forms as suspensions, solutions, or emulsions in oily or aqueous vehicles and may contain formulatory agents such as suspending, stabilizing and/or dispersing agents. Pharmaceutical compositions suitable for rectal administration can be prepared as unit dose suppositories. Suitable carriers include saline solution and other materials commonly used in the art.

[0160] For administration by inhalation, an antibody can be conveniently delivered from an insufflator, nebulizer or a pressurized pack or other convenient means of delivering an aerosol spray. Pressurized packs may comprise a suitable propellant such as dichlorodifluoromethane, trichlorofluoromethane, dichlorotetrafluoroethane, carbon dioxide or other suitable gas. In the case of a pressurized aerosol, the dosage unit may be determined by providing a valve to deliver a metered amount.

[0161] Alternatively, for administration by inhalation or insufflation, an antibody may take the form of a dry powder composition, for example, a powder mix of a modulator and a suitable powder base such as lactose or starch. The powder composition may be presented in a unit dosage form in, for example, capsules or cartridges or, e.g., gelatin or blister packs from which the powder may be administered with the aid of an inhalator or insufflator. For intra-nasal administration, an antibody may be administered via a liquid spray, such as via a plastic bottle atomizer.

[0162] Pharmaceutical compositions of the invention may also contain other ingredients such as flavorings, colorings, anti-microbial agents, or preservatives. It will be appreciated that the amount of an antibody required for use in treatment will vary not only with the particular carrier selected but also with the route of administration, the nature of the condition being treated, and the age and condition of the patient. Ultimately the attendant health care provider may determine proper dosage. In addition, a pharmaceutical composition may be formulated as a single unit dosage form.

[0163] The pharmaceutical composition of the present invention can be in the form of sterile aqueous solutions or dispersions. It can also be formulated in a microemulsion, liposome, or other ordered structure suitable to high drug concentration.

[0164] An antibody of the present invention described herein can be administered as a sustained release formulation, in which case less frequent administration is required. Dosage and frequency vary depending on the half-life of the antibody in the patient. In general, human antibodies show the longest half-life, followed by humanized antibodies, chimeric antibodies, and nonhuman antibodies. The dosage and frequency of administration can vary depending on whether the treatment is prophylactic or therapeutic. In prophylactic applications, a relatively low dosage is administered at relatively infrequent intervals over a long period of time. Some patients continue to receive treatment for the rest of their lives. In therapeutic applications, a relatively high dosage at relatively short intervals is sometimes required until progression of the disease is reduced or terminated, and preferably, until the patient shows partial or complete amelioration of symptoms of the disease. Thereafter, the patient can be administered a prophylactic regime.

[0165] The amount of active ingredient that can be combined with a carrier material to produce a single dosage form will vary depending upon the subject being treated and the particular mode of administration and will generally be that amount of the composition, which produces a therapeutic effect. Generally, out of one hundred percent, this amount will range from about 0.01% to about 99% of active ingredient, preferably from about 0.1% to about 70%, most preferably from about 1% to about 30% of active ingredient in combination with a pharmaceutically acceptable carrier.

[0166] Dosage regimens can be adjusted to provide the optimum desired response (e.g., a therapeutic response). For example, a single bolus can be administered, several divided doses can be administered over time or the dose can be proportionally reduced or increased as indicated by the exigencies of the therapeutic situation. It is especially advantageous to formulate parenteral compositions in dosage unit form for ease of administration and uniformity of dosage. Dosage unit form as used herein refers to physically discrete units suited as unitary dosages for the subjects to be treated; each unit contains a predetermined quantity of active compound calculated to produce the desired therapeutic effect in association with the required pharmaceutical carrier. Alternatively, the antibody can be administered as a sustained release formulation, in which case less frequent administration is required. For administration of the antibody, the dosage ranges from about 0.0001 to 800 mg/kg, and more usually 0.01 to 5 mg/kg, of the host body weight. For example dosages can be 0.3 mg/kg body weight, 1 mg/kg body weight, 3 mg/kg body weight, 5 mg/kg body weight or 10 mg/kg body weight or within the range of 1-10 mg/kg. An exemplary treatment regime entails administration once per week, once every two weeks, once every three weeks, once every four weeks, once a month, once every 3 months or once every three to 6 months. Preferred dosage regimens for an antibody of the invention include 1 mg/kg body weight or 3 mg/kg body weight via intravenous administration, with the antibody being given using one of the following dosing schedules: (i) every four weeks for six dosages, then every three months; (ii) every three weeks; (iii) 3 mg/kg body weight once followed by 1 mg/kg body weight every three weeks. In some methods, dosage is adjusted to achieve a plasma antibody concentration of about 1-1000 μg/ml and in some methods about 25-300 μg/ml. A “therapeutically effective dosage” of an antibody of the invention preferably results in a decrease in severity of disease symptoms, an increase in frequency and duration of disease symptom-free periods, or a prevention of impairment or disability due to the disease affliction. For example, for the treatment of tick-borne flavivirus (e.g., TBEV) infection in a subject, a “therapeutically effective dosage” preferably inhibits a tick-borne flavivirus (e.g., TBEV) replication or uptake by host cells by at least about 20%, more preferably by at least about 40%, even more preferably by at least about 60%, and still more preferably by at least about 80% relative to untreated subjects. A therapeutically effective amount of a therapeutic compound can neutralize a tick-borne flavivirus (e.g., TBEV), or otherwise ameliorate symptoms in a subject, which is typically a human or can be another mammal.

[0167] The pharmaceutical composition can be a controlled release formulation, including implants, transdermal patches, and microencapsulated delivery systems. Biodegradable, biocompatible polymers can be used, such as ethylene vinyl acetate, polyanhydrides, polyglycolic acid, collagen, polyorthoesters, and polylactic acid. See, e.g., Sustained and Controlled Release Drug Delivery Systems, J. R. Robinson, ed., Marcel Dekker, Inc., New York, 1978.

[0168] Therapeutic compositions can be administered via medical devices such as (1) needleless hypodermic injection devices (e.g., U.S. Pat. Nos. 5,399,163; 5,383,851; 5,312,335; 5,064,413; 4,941,880; 4,790,824; and 4,596,556); (2) micro-infusion pumps (U.S. Pat. No. 4,487,603); (3) transdermal devices (U.S. Pat. No. 4,486,194); (4) infusion apparati (U.S. Pat. Nos. 4,447,233 and 4,447,224); and (5) osmotic devices (U.S. Pat. Nos. 4,439,196 and 4,475,196); the disclosures of which are incorporated herein by reference.

[0169] In some embodiments, the human monoclonal antibodies described herein can be formulated to ensure proper distribution in vivo. For example, to ensure that the therapeutic compounds of the invention cross the blood-brain barrier, they can be formulated in liposomes, which may additionally comprise targeting moieties to enhance selective transport to specific cells or organs. See, e.g., U.S. Pat. Nos. 4,522,811; 5,374,548; 5,416,016; and 5,399,331; V. V. Ranade (1989) Clin. Pharmacol. 29:685; Umezawa et al., (1988) Biochem. Biophys. Res. Commun. 153:1038; Bloeman et al. (1995) FEBS Lett. 357:140; M. Owais et al. (1995) Antimicrob. Agents Chemother. 39:180; Briscoe et al. (1995) Am. Physiol. 1233:134; Schreier et al. (1994). Biol. Chem. 269:9090; Keinanen and Laukkanen (1994) FEBS Lett. 346:123; and Killion and Fidler (1994) Immunomethods 4:273.

[0170] In some embodiments, the initial dose may be followed by administration of a second or a plurality of subsequent doses of the antibody or antigen-binding fragment thereof in an amount that can be approximately the same or less than that of the initial dose, wherein the subsequent doses are separated by at least 1 day to 3 days; at least one week, at least 2 weeks; at least 3 weeks; at least 4 weeks; at least 5 weeks; at least 6 weeks; at least 7 weeks; at least 8 weeks; at least 9 weeks; at least 10 weeks; at least 12 weeks; or at least 14 weeks.

[0171] Various delivery systems are known and can be used to administer the pharmaceutical composition of the invention, e.g., encapsulation in liposomes, microparticles, microcapsules, recombinant cells capable of expressing the mutant viruses, receptor-mediated endocytosis (see, e.g., Wu et al. (1987) J. Biol. Chem. 262:4429-4432). Methods of introduction include, but are not limited to, intradermal, transdermal, intramuscular, intraperitoneal, intravenous, subcutaneous, intranasal, epidural, and oral routes. The composition may be administered by any convenient route, for example, by infusion or bolus injection, by absorption through epithelial or mucocutaneous linings (e.g., oral mucosa, rectal and intestinal mucosa, etc.) and may be administered together with other biologically active agents. Administration can be systemic or local. The pharmaceutical composition can also be delivered in a vesicle, in particular, a liposome (see, for example, Langer (1990) Science 249: 1527-1533).

[0172] The use of nanoparticles to deliver the antibodies of the present invention is also contemplated herein. Antibody-conjugated nanoparticles may be used both for therapeutic and diagnostic applications. Antibody-conjugated nanoparticles and methods of preparation and use are described in detail by Arruebo, M., et al. 2009 (“Antibody-conjugated nanoparticles for biomedical applications” in J. Nanomat. Volume 2009, Article ID 439389), incorporated herein by reference. Nanoparticles may be developed and conjugated to antibodies contained in pharmaceutical compositions to target cells. Nanoparticles for drug delivery have also been described in, for example, U.S. Pat. No. 8,257,740, or U.S. Pat. No. 8,246,995, each incorporated herein in its entirety.

[0173] In certain situations, the pharmaceutical composition can be delivered in a controlled release system. In one embodiment, a pump may be used. In another embodiment, polymeric materials can be used. In yet another embodiment, a controlled release system can be placed in proximity of the composition's target, thus requiring only a fraction of the systemic dose.

[0174] The injectable preparations may include dosage forms for intravenous, subcutaneous, intracutaneous, intracranial, intraperitoneal, and intramuscular injections, drip infusions, etc. These injectable preparations may be prepared by methods publicly known. For example, the injectable preparations may be prepared, e.g., by dissolving, suspending or emulsifying the antibody or its salt described above in a sterile aqueous medium or an oily medium conventionally used for injections. As the aqueous medium for injections, there are, for example, physiological saline, an isotonic solution containing glucose and other auxiliary agents, etc., which may be used in combination with an appropriate solubilizing agent such as an alcohol (e.g., ethanol), a polyalcohol (e.g., propylene glycol, polyethylene glycol), a nonionic surfactant [e.g., polysorbate 80, HCO-50 (polyoxyethylene (50 mol) adduct of hydrogenated castor oil)], etc. As the oily medium, there are employed, e.g., sesame oil, soybean oil, etc., which may be used in combination with a solubilizing agent such as benzyl benzoate, benzyl alcohol, etc. The injection thus prepared is preferably filled in an appropriate ampoule.

[0175] A pharmaceutical composition of the present invention can be delivered subcutaneously or intravenously with a standard needle and syringe. In addition, with respect to subcutaneous delivery, a pen delivery device readily has applications in delivering a pharmaceutical composition of the present invention. Such a pen delivery device can be reusable or disposable. A reusable pen delivery device generally utilizes a replaceable cartridge that contains a pharmaceutical composition. Once all of the pharmaceutical composition within the cartridge has been administered and the cartridge is empty, the empty cartridge can readily be discarded and replaced with a new cartridge that contains the pharmaceutical composition. The pen delivery device can then be reused. In a disposable pen delivery device, there is no replaceable cartridge. Rather, the disposable pen delivery device comes prefilled with the pharmaceutical composition held in a reservoir within the device. Once the reservoir is emptied of the pharmaceutical composition, the entire device is discarded.

[0176] Numerous reusable pen and autoinjector delivery devices have applications in the subcutaneous delivery of a pharmaceutical composition of the present invention. Examples include, but certainly are not limited to AUTOPEN™ (Owen Mumford, Inc., Woodstock, UK), DISETRONIC™ pen (Disetronic Medical Systems, Burghdorf, Switzerland), HUMALOG MIX 75/25™ pen, HUMALOG™ pen, HUMALIN 70/30™ pen (Eli Lilly and Co., Indianapolis, IN), NOVOPEN™ I, II and III (Novo Nordisk, Copenhagen, Denmark), NOVOPEN JUNIOR™ (Novo Nordisk, Copenhagen, Denmark), BD™ pen (Becton Dickinson, Franklin Lakes, NJ), OPTIPEN™ OPTIPEN PRO™, OPTIPEN STARLET™, and OPTICLIK™ (Sanofi-Aventis, Frankfurt, Germany), to name only a few. Examples of disposable pen delivery devices having applications in subcutaneous delivery of a pharmaceutical composition of the present invention include, but certainly are not limited to the SOLOSTAR™ pen (Sanofi-Aventis), the FLEXPEN™ (Novo Nordisk), and the KWIKPEN™ (Eli Lilly), the SURECLICK™ Autoinjector (Amgen, Thousand Oaks, CA), the PENLET™ (Haselmeier, Stuttgart, Germany), the EPIPEN (Dey, L.P.) and the HUMIRA™ Pen (Abbott Labs, Abbott Park, IL), to name only a few.

[0177] Advantageously, the pharmaceutical compositions for oral or parenteral use described above are prepared into dosage forms in a unit dose suited to fit a dose of the active ingredients. Such dosage forms in a unit dose include, for example, tablets, pills, capsules, injections (ampoules), suppositories, etc. The amount of the antibody contained is generally about 5 to about 500 mg per dosage form in a unit dose; especially in the form of injection, it is preferred that the antibody is contained in about 5 to about 300 mg and in about 10 to about 300 mg for the other dosage forms.

### C. Methods of Use

[0178] Methods of Treatment

[0179] The antibodies, compositions, and formulations described herein can be used to neutralize a tick-borne flavivirus (e.g., TBEV) and thereby treating or preventing diseases or infections caused by various tick-borne flaviviruses, including TBEV.

[0180] Accordingly, in one aspect, this disclosure further provides a method of neutralizing a tick-borne flavivirus (e.g., TBEV) in a subject. The method comprises administering to a subject in need thereof a therapeutically effective amount of the antibody or antigen-binding fragment thereof or a therapeutically effective amount of the pharmaceutical composition, as described above.

[0181] In another aspect, this disclosure additionally provides a method of preventing or treating tick-borne flavivirus (e.g., TBEV) infection. The method comprises administering to a subject in need thereof a therapeutically effective amount of the antibody or antigen-binding fragment thereof or a therapeutically effective amount of the pharmaceutical composition, as described above.

[0182] For example, the neutralizing of a TBEV can be carried out via (i) inhibiting TBEV binding to a target cell; (ii) inhibiting TBEV uptake by a target cell; (iii) inhibiting TBEV replication; and (iv) inhibiting TBEV virus particle release from infected cells. One skilled in the art possesses the ability to perform any assay to assess neutralization of TBEV.

[0183] Notably, the neutralizing properties of antibodies may be assessed by a variety of tests, which all may assess the consequences of (i) inhibition of TBEV binding to a target cell; (ii) inhibition of TBEV uptake by a target cell; (iii) inhibition of TBEV replication; and (iv) inhibition of TBEV virus particle release from infected cells. In other words, implementing different tests may lead to the observation of the same consequence, i.e., the loss of infectivity of the TBEV. Thus, in one embodiment, the present invention provides a method of neutralizing TBEV in a subject comprising administering to the subject a therapeutically effective amount of the antibody of the present invention described herein.

[0184] Another aspect of the present invention provides a method of treating a tick-borne flavivirus (e.g., TBEV)-related disease. Such a method includes therapeutic (e.g., following TBEV infection) and prophylactic (e.g., prior to TBEV exposure, infection or pathology). For example, therapeutic and prophylactic methods of treating an individual for TBEV infection include treatment of an individual having or at risk of having TBEV infection or pathology, treating an individual with a TBEV infection, and methods of protecting an individual from TBEV infection, to decrease or reduce the probability of TBEV infection in an individual, to decrease or reduce susceptibility of an individual to TBEV infection, or to inhibit or prevent TBEV infection in an individual, and to decrease, reduce, inhibit or suppress transmission of a TBEV from an infected individual to an uninfected individual. Such methods include administering an antibody of the present invention or a composition comprising the antibody disclosed herein to therapeutically or prophylactically treat (vaccinate or immunize) an individual having or at risk of having TBEV infection or pathology. Accordingly, methods can treat the TBEV infection or pathology, or provide the individual with protection from infection (e.g., prophylactic protection).

[0185] In one embodiment, a method of treating a tick-borne flavivirus (e.g., TBEV)-related disease comprises administering to an individual in need thereof an antibody or therapeutic composition disclosed herein in an amount sufficient to reduce one or more physiological conditions or symptoms associated with tick-borne flavivirus (e.g., TBEV) infection or pathology, thereby treating the tick-borne flavivirus (e.g., TBEV)-related disease.

[0186] In one embodiment, an antibody or therapeutic composition disclosed herein is used to treat a tick-borne flavivirus (e.g., TBEV)-related disease. In some embodiments, use of an antibody or therapeutic composition disclosed herein treats a TBEV-related disease by reducing one or more physiological conditions or symptoms associated with TBEV infection or pathology. In aspects of this embodiment, administration of an antibody or therapeutic composition disclosed herein is in an amount sufficient to reduce one or more physiological conditions or symptoms associated with TBEV infection or pathology, thereby treating the TBEV-based disease. In other aspects of this embodiment, administration of an antibody or therapeutic composition disclosed herein is in an amount sufficient to increase, induce, enhance, augment, promote or stimulate TBEV clearance or removal; or decrease, reduce, inhibit, suppress, prevent, control, or limit transmission of TBEV to another individual.

[0187] One or more physiological conditions or symptoms associated with tick-borne flavivirus (e.g., TBEV) infection or pathology will respond to a method of treatment disclosed herein. The symptoms of tick-borne flavivirus (e.g., TBEV) infection or pathology vary, depending on the phase of infection.

[0188] In some embodiments, the method of neutralizing a tick-borne flavivirus (e.g., TBEV) in a subject comprises administering to a subject in need thereof a therapeutically effective amount of a first antibody or antigen-binding fragment thereof and a second antibody or antigen-binding fragment thereof of the antibody or antigen-binding fragment, as described above, wherein the first antibody or antigen-binding fragment thereof and the second antibody or antigen binding fragment thereof exhibit synergistic activity or a therapeutically effective amount of the pharmaceutical composition described above.

[0189] In some embodiments, the method of preventing or treating tick-borne flavivirus (e.g., TBEV) infection comprises administering to a subject in need thereof a therapeutically effective amount of a first antibody or antigen-binding fragment thereof and a second antibody or antigen-binding fragment thereof of the antibody or antigen-binding fragment, as described above, wherein the first antibody or antigen-binding fragment thereof and the second antibody or antigen binding fragment thereof exhibit synergistic activity or a therapeutically effective amount of the pharmaceutical composition described above. In some embodiments, the first antibody or antigen-binding fragment thereof is administered before, after, or concurrently with the second antibody or antigen-binding fragment thereof.

[0190] In some embodiments, the first antibody or antigen-binding fragment thereof and the second antibody or antigen-binding fragment thereof can be any combinations of the antibody or antigen-binding fragment thereof comprising a heavy chain and a light chain that comprise the respective amino acid sequences described herein.

[0191] In some embodiments, the second therapeutic agent comprises an anti-inflammatory drug or an antiviral compound. In some embodiments, the antiviral compound comprises: a nucleoside analog, a peptoid, an oligopeptide, a polypeptide, a protease inhibitor, a 3C-like protease inhibitor, a papain-like protease inhibitor, or an inhibitor of an RNA dependent RNA polymerase. In some embodiments, the antiviral compound may include: acyclovir, gancyclovir, vidarabine, foscarnet, cidofovir, amantadine, ribavirin, trifluorothymidine, zidovudine, didanosine, zalcitabine or an interferon. In some embodiments, the interferon is an interferon-α or an interferon-β.

[0192] In some embodiments, the antibody or antigen-binding fragment thereof is administered before, after, or concurrently with the second therapeutic agent or therapy. In some embodiments, the antibody or antigen-binding fragment thereof is administered to the subject intravenously, subcutaneously, or intraperitoneally. In some embodiments, the antibody or antigen-binding fragment thereof is administered prophylactically or therapeutically.

[0193] The antibodies described herein can be used together with one or more of other anti-TBEV virus antibodies to neutralize a tick-borne flavivirus (e.g., TBEV) and thereby treating tick-borne flavivirus (e.g., TBEV) infection.

[0194] Combination Therapies

[0195] Combination therapies may include an anti-TBEV antibody as described and any additional therapeutic agent that may be advantageously combined with an antibody or a biologically active fragment of an antibody as described. The antibodies may be combined synergistically with one or more drugs or therapy used to treat a disease or disorder associated with a viral infection, such as tick-borne flavivirus (e.g., TBEV) infection. In some embodiments, the antibodies of the invention may be combined with a second therapeutic agent to ameliorate one or more symptoms of said disease. In some embodiments, the antibodies may be combined with a second antibody to provide synergistic activity in ameliorating one or more symptoms of said disease. In some embodiments, the first antibody or antigen-binding fragment thereof is administered before, after, or concurrently with the second antibody or antigen-binding fragment thereof.

[0196] For example, the antibody described herein can be used in various detection methods for use in, e.g., monitoring the progression of tick-borne flavivirus (e.g., TBEV) infection; monitoring patient response to treatment for such an infection, etc.

[0197] In some embodiments, the second therapeutic agent is another antibody to a tick-borne flavivirus (e.g., TBEV) protein or a fragment thereof. It is contemplated herein to use a combination (“cocktail”) of antibodies with broad neutralization or inhibitory activity against a tick-borne flavivirus (e.g., TBEV). In some embodiments, non-competing antibodies may be combined and administered to a subject in need thereof. In some embodiments, the antibodies comprising the combination bind to distinct non-overlapping epitopes on the protein. In some embodiments, the second antibody may possess a longer half-life in human serum.

[0198] As used herein, the term “in combination with” means that additional therapeutically active component(s) may be administered prior to, concurrent with, or after the administration of the anti-TBEV antibody of the present invention. The term “in combination with” also includes sequential or concomitant administration of an anti-TBEV antibody and a second therapeutic agent.

[0199] The additional therapeutically active component(s) may be administered to a subject prior to administration of an anti-TBEV antibody of the present invention. For example, a first component may be deemed to be administered “prior to” a second component if the first component is administered 1 week before, 72 hours before, 60 hours before, 48 hours before, 36 hours before, 24 hours before, 12 hours before, 6 hours before, 5 hours before, 4 hours before, 3 hours before, 2 hours before, 1 hour before, 30 minutes before, 15 minutes before, 10 minutes before, 5 minutes before, or less than 1 minute before administration of the second component. In other embodiments, the additional therapeutically active component(s) may be administered to a subject after administration of an anti-TBEV antibody of the present invention. For example, a first component may be deemed to be administered “after” a second component if the first component is administered 1 minute after, 5 minutes after, 10 minutes after, 15 minutes after, 30 minutes after, 1 hour after, 2 hours after, 3 hours after, 4 hours after, 5 hours after, 6 hours after, 12 hours after, 24 hours after, 36 hours after, 48 hours after, 60 hours after, 72 hours after administration of the second component. In yet other embodiments, the additional therapeutically active component(s) may be administered to a subject concurrent with administration of an anti-TBEV antibody of the present invention. “Concurrent” administration, for purposes of the present invention, includes, e.g., administration of an anti-TBEV antibody and an additional therapeutically active component to a subject in a single dosage form or in separate dosage forms administered to the subject within about 30 minutes or less of each other. If administered in separate dosage forms, each dosage form may be administered via the same route (e.g., both the anti-TBEV antibody and the additional therapeutically active component may be administered intravenously, etc.); alternatively, each dosage form may be administered via a different route (e.g., the anti-TBEV antibody may be administered intravenously, and the additional therapeutically active component may be administered orally). In any event, administering the components in a single dosage from, in separate dosage forms by the same route, or in separate dosage forms by different routes are all considered “concurrent administration,” for purposes of the present disclosure. For purposes of the present disclosure, administration of an anti-TBEV antibody “prior to,” “concurrent with,” or “after” (as those terms are defined hereinabove) administration of an additional therapeutically active component is considered administration of an anti-TBEV antibody “in combination with” an additional therapeutically active component.

[0200] The present invention includes pharmaceutical compositions in which an anti-TBEV antibody of the present invention is co-formulated with one or more of the additional therapeutically active component(s) as described elsewhere herein.

[0201] Administration Regimens

[0202] According to certain embodiments, a single dose of an anti-TBEV antibody as described (or a pharmaceutical composition comprising a combination of an anti-TBEV antibody and any of the additional therapeutically active agents mentioned herein) may be administered to a subject in need thereof. According to certain embodiments of the present invention, multiple doses of an anti-TBEV antibody (or a pharmaceutical composition comprising a combination of an anti-TBEV antibody and any of the additional therapeutically active agents mentioned herein) may be administered to a subject over a defined time course. The methods according to this aspect of the invention comprise sequentially administering to a subject multiple doses of an anti-TBEV antibody. As used herein, “sequentially administering” means that each dose of anti-TBEV antibody is administered to the subject at a different point in time, e.g., on different days separated by a predetermined interval (e.g., hours, days, weeks or months). This disclosure provides methods which comprise sequentially administering to the patient a single initial dose of an anti-TBEV antibody, followed by one or more secondary doses of the anti-TBEV antibody, and optionally followed by one or more tertiary doses of the anti-TBEV antibody.

[0203] The terms “initial dose,” “secondary doses,” and “tertiary doses,” refer to the temporal sequence of administration of the anti-TBEV antibody of the invention. Thus, the “initial dose” is the dose which is administered at the beginning of the treatment regimen (also referred to as the “baseline dose”); the “secondary doses” are the doses which are administered after the initial dose; and the “tertiary doses” are the doses which are administered after the secondary doses. The initial, secondary, and tertiary doses may all contain the same amount of anti-TBEV antibody, but generally may differ from one another in terms of frequency of administration. In some embodiments, however, the amount of anti-TBEV antibody contained in the initial, secondary and/or tertiary doses varies from one another (e.g., adjusted up or down as appropriate) during the course of treatment. In some embodiments, two or more (e.g., 2, 3, 4, or 5) doses are administered at the beginning of the treatment regimen as “loading doses” followed by subsequent doses that are administered on a less frequent basis (e.g., “maintenance doses”).

[0204] In certain exemplary embodiments of the present invention, each secondary and/or tertiary dose is administered 1 to 48 hours (e.g., 1, 1½, 2, 2½, 3, 3½, 4, 4½, 5, 5½, 6, 6½, 7, 7½, 8, 8½, 9, 9½, 10, 10½, 11, 11½, 12, 12½, 13, 13½, 14, 14½, 15, 15½, 16, 16½, 17, 17½, 18, 18½, 19, 19½, 20, 20½, 21, 21½, 22, 22½, 23, 23½24, 24½, 25, 25½26, 26½, or more) after the immediately preceding dose. The phrase “the immediately preceding dose,” as used herein, means, in a sequence of multiple administrations, the dose of anti-TBEV antibody, which is administered to a patient prior to the administration of the very next dose in the sequence with no intervening doses.

[0205] The methods, according to this aspect of the invention, may comprise administering to a patient any number of secondary and/or tertiary doses of an anti-TBEV antibody. For example, In some embodiments, only a single secondary dose is administered to the patient. In other embodiments, two or more (e.g., 2, 3, 4, 5, 6, 7, 8, or more) secondary doses are administered to the patient. Likewise, In some embodiments, only a single tertiary dose is administered to the patient. In other embodiments, two or more (e.g., 2, 3, 4, 5, 6, 7, 8, or more) tertiary doses are administered to the patient.

[0206] In some embodiments of the invention, the frequency at which the secondary and/or tertiary doses are administered to a patient can vary over the course of the treatment regimen. The frequency of administration may also be adjusted during the course of treatment by a physician depending on the needs of the individual patient following clinical examination.

[0207] Diagnostic Uses of the Antibodies

[0208] The disclosed anti-TBEV antibodies may be used to detect and/or measure a tick-borne flavivirus (e.g., TBEV) in a sample, e.g., for diagnostic purposes. Some embodiments contemplate the use of one or more antibodies of the present invention in assays to detect a tick-borne flavivirus (e.g., TBEV)-associated disease or disorder. Exemplary diagnostic assays for TBEV may comprise, e.g., contacting a sample, obtained from a patient, with an anti-TBEV antibody, wherein the anti-TBEV antibody is labeled with a detectable label or reporter molecule or used as a capture ligand to selectively isolate TBEV from patient samples. Alternatively, an unlabeled anti-TBEV antibody can be used in diagnostic applications in combination with a secondary antibody, which is itself detectably labeled. The detectable label or reporter molecule can be a radioisotope, such as H, C, P, S, or I; a fluorescent or chemiluminescent moiety such as fluorescein isothiocyanate, or rhodamine; or an enzyme such as alkaline phosphatase, β-galactosidase, horseradish peroxidase, or luciferase. Specific exemplary assays that can be used to detect or measure a tick-borne flavivirus (e.g., TBEV) in a sample include enzyme-linked immunosorbent assay (ELISA), radioimmunoassay (RIA), and fluorescence-activated cell sorting (FACS).

[0209] In another aspect, this disclosure further provides a method for detecting the presence of a tick-borne flavivirus (e.g., TBEV) in a sample comprising the steps of: (i) contacting a sample with the antibody or antigen-binding fragment thereof described above; and (ii) determining binding of the antibody or antigen-binding fragment to one or more tick-borne flavivirus (e.g., TBEV) antigens, wherein binding of the antibody to the one or more tick-borne flavivirus (e.g., TBEV) antigens is indicative of the presence of the tick-borne flavivirus (e.g., TBEV) in the sample.

[0210] In some embodiments, the antibody or antigen-binding fragment thereof is conjugated to a label. In some embodiments, the step of detecting comprises contacting a secondary antibody with the antibody or antigen-binding fragment thereof and wherein the secondary antibody comprises a label. In some embodiments, the label includes a fluorescent label, a chemiluminescent label, a radiolabel, and an enzyme.

[0211] In some embodiments, the step of detecting comprises detecting fluorescence or chemiluminescence. In some embodiments, the step of detecting comprises a competitive binding assay or ELISA.

[0212] In some embodiments, the method further comprises binding the sample to a solid support. In some embodiments, the solid support includes microparticles, microbeads, magnetic beads, and an affinity purification column.

[0213] Samples that can be used in tick-borne flavivirus (e.g., TBEV) diagnostic assays include any tissue or fluid sample obtainable from a patient, which contains detectable quantities of either a tick-borne flavivirus (e.g., TBEV) protein or fragments thereof, under normal or pathological conditions. Generally, levels of TBEV protein in a particular sample obtained from a healthy patient (e.g., a patient not afflicted with a disease associated with a tick-borne flavivirus (e.g., TBEV)) will be measured to initially establish a baseline, or standard, level of the tick-borne flavivirus (e.g., TBEV). This baseline level of the tick-borne flavivirus (e.g., TBEV) can then be compared against the levels of the tick-borne flavivirus (e.g., TBEV) measured in samples obtained from individuals suspected of having a tick-borne flavivirus (e.g., TBEV)-associated condition, or symptoms associated with such condition.

[0214] The antibodies specific for a tick-borne flavivirus (e.g., TBEV) protein may contain no additional labels or moieties, or they may contain an N-terminal or C-terminal label or moiety. In one embodiment, the label or moiety is biotin. In a binding assay, the location of a label (if any) may determine the orientation of the peptide relative to the surface upon which the peptide is bound. For example, if a surface is coated with avidin, a peptide containing an N-terminal biotin will be oriented such that the C-terminal portion of the peptide will be distal to the surface.

### D. Kits

[0215] In another aspect, this disclosure provides a kit comprising a pharmaceutically acceptable dose unit of the antibody or antigen-binding fragment thereof of or the pharmaceutical composition as described above. Also within the scope of this disclosure is a kit for the diagnosis, prognosis or monitoring the treatment of tick-borne flavivirus (e.g., TBEV)-associated infections or diseases in a subject, comprising: the antibody or antigen-binding fragment thereof as described; and a least one detection reagent that binds specifically to the antibody or antigen-binding fragment thereof.

[0216] In some embodiments, the kit also includes a container that contains the composition and optionally informational material. The informational material can be descriptive, instructional, marketing or other material that relates to the methods described herein and/or the use of the agents for therapeutic benefit. In an embodiment, the kit also includes an additional therapeutic agent, as described above. For example, the kit includes a first container that contains the composition and a second container for the additional therapeutic agent.

[0217] The informational material of the kits is not limited in its form. In some embodiments, the informational material can include information about production of the composition, concentration, date of expiration, batch or production site information, and so forth. In one embodiment, the informational material relates to methods of administering the composition, e.g., in a suitable dose, dosage form, or mode of administration (e.g., a dose, dosage form, or mode of administration described herein), to treat a subject in need thereof. In one embodiment, the instructions provide a dosing regimen, dosing schedule, and/or route of administration of the composition or the additional therapeutic agent. The information can be provided in a variety of formats, including printed text, computer-readable material, video recording, or audio recording, or information that contains a link or address to substantive material.

[0218] The kit can include one or more containers for the composition. In some embodiments, the kit contains separate containers, dividers or compartments for the composition and informational material. For example, the composition can be contained in a bottle or vial, and the informational material can be contained in a plastic sleeve or packet. In other embodiments, the separate elements of the kit are contained within a single, undivided container. For example, the composition is contained in a bottle or vial that has attached thereto the informational material in the form of a label. In some embodiments, the kit includes a plurality (e.g., a pack) of individual containers, each containing one or more unit dosage forms (e.g., a dosage form described herein) of the agents.

[0219] The kit optionally includes a device suitable for administration of the composition or other suitable delivery device. The device can be provided pre-loaded with one or both of the agents or can be empty, but suitable for loading. Such a kit may optionally contain a syringe to allow for injection of the antibody contained within the kit into an animal, such as a human.

### E. Definitions

[0220] To aid in understanding the detailed description of the compositions and methods according to the disclosure, a few express definitions are provided to facilitate an unambiguous disclosure of the various aspects of the disclosure. Unless otherwise defined, all technical and scientific terms used herein have the same meaning as commonly understood by one of ordinary skill in the art to which this disclosure belongs.

[0221] The term “antibody” as referred to herein includes whole antibodies and any antigen-binding fragment or single chains thereof. Whole antibodies are glycoproteins comprising at least two heavy (H) chains and two light (L) chains inter-connected by disulfide bonds. Each heavy chain is comprised of a heavy chain variable region (abbreviated herein as VH) and a heavy chain constant region. The heavy chain constant region is comprised of three domains, CH1, CH2 and CH3. Each light chain is comprised of a light chain variable region (abbreviated herein as VL) and a light chain constant region. The light chain constant region is comprised of one domain, CL. The VH and VL regions can be further subdivided into regions of hypervariability, termed complementarity determining regions (CDR), interspersed with regions that are more conserved, termed framework regions (FR). Each VH and VL is composed of three CDRs and four FRs, arranged from amino-terminus to carboxy-terminus in the following order: FR1, CDR1, FR2, CDR2, FR3, CDR3, FR4. The heavy chain variable region CDRs and FRs are HFR1, HCDR1, HFR2, HCDR2, HFR3, HCDR3, HFR4. The light chain variable region CDRs and FRs are LFR1, LCDR1, LFR2, LCDR2, LFR3, LCDR3, LFR4. The variable regions of the heavy and light chains contain a binding domain that interacts with an antigen. The constant regions of the antibodies can mediate the binding of the immunoglobulin to host tissues or factors, including various cells of the immune system (e.g., effector cells) and the first component (CIq) of the classical complement system.

[0222] The term “antigen-binding fragment or portion” of an antibody (or simply “antibody fragment or portion”), as used herein, refers to one or more fragments of an antibody that retain the ability to specifically bind to an antigen. It has been shown that the antigen-binding function of an antibody can be performed by fragments of a full-length antibody. Examples of binding fragments encompassed within the term “antigen-binding fragment or portion” of an antibody include (i) a Fab fragment, a monovalent fragment consisting of the VL, VH, CL and CHI domains; (ii) a F(ab′)2 fragment, a bivalent fragment comprising two Fab fragments linked by a disulfide bridge at the hinge region; (iii) a Fab′ fragment, which is essentially a Fab with part of the hinge region (see, FUNDAMENTAL IMMUNOLOGY (Paul ed., 3rd ed. 1993)); (iv) a Fd fragment consisting of the VH and CHI domains; (v) a Fv fragment consisting of the VL and VH domains of a single arm of an antibody, (vi) a dAb fragment (Ward et al., (1989) Nature 341:544-546), which consists of a VH domain; (vii) an isolated CDR; and (viii) a nanobody, a heavy chain variable region containing a single variable domain and two constant domains. Furthermore, although the two domains of the Fv fragment, VL and VH, are coded for by separate genes, they can be joined, using recombinant methods, by a synthetic linker that enables them to be made as a single protein chain in which the VL and VH regions pair to form monovalent molecules (known as single chain Fv or scFv); see, e.g., Bird et al. (1988) Science 242:423-426; and Huston et al. (1988) Proc. Natl. Acad. Sci. USA 85:5879-5883). Such single chain antibodies are also intended to be encompassed within the term “antigen-binding fragment or portion” of an antibody. These antibody fragments are obtained using conventional techniques known to those with skill in the art, and the fragments are screened for utility in the same manner as are intact antibodies.

[0223] An “isolated antibody,” as used herein, is intended to refer to an antibody that is substantially free of other antibodies having different antigenic specificities. An isolated antibody can be substantially free of other cellular material and/or chemicals.

[0224] The terms “monoclonal antibody” or “monoclonal antibody composition” as used herein refer to a preparation of antibody molecules of single molecular composition. A monoclonal antibody composition displays a single binding specificity and affinity for a particular epitope.

[0225] The term “human antibody” is intended to include antibodies having variable regions in which both the framework and CDR regions are derived from human germline immunoglobulin sequences. Furthermore, if the antibody contains a constant region, the constant region also is derived from human germline immunoglobulin sequences. The human antibodies of the invention can include amino acid residues not encoded by human germline immunoglobulin sequences (e.g., mutations introduced by random or site-specific mutagenesis in vitro or by somatic mutation in vivo). However, the term “human antibody,” as used herein, is not intended to include antibodies in which CDR sequences derived from the germline of another mammalian species, such as a mouse, have been grafted onto human framework sequences.

[0226] The term “human monoclonal antibody” refers to antibodies displaying a single binding specificity, which have variable regions in which both the framework and CDR regions are derived from human germline immunoglobulin sequences. In one embodiment, the human monoclonal antibodies can be produced by a hybridoma that includes a B cell obtained from a transgenic nonhuman animal, e.g., a transgenic mouse, having a genome comprising a human heavy chain transgene and a light chain transgene fused to an immortalized cell.

[0227] The term “recombinant human antibody,” as used herein, includes all human antibodies that are prepared, expressed, created or isolated by recombinant means, such as (a) antibodies isolated from an animal (e.g., a mouse) that is transgenic or transchromosomal for human immunoglobulin genes or a hybridoma prepared therefrom (described further below), (b) antibodies isolated from a host cell transformed to express the human antibody, e.g., from a transfectoma, (c) antibodies isolated from a recombinant, combinatorial human antibody library, and (d) antibodies prepared, expressed, created or isolated by any other means that involve splicing of human immunoglobulin gene sequences to other DNA sequences. Such recombinant human antibodies have variable regions in which the framework and CDR regions are derived from human germline immunoglobulin sequences. In some embodiments, however, such recombinant human antibodies can be subjected to in vitro mutagenesis (or, when an animal transgenic for human Ig sequences is used, in vivo somatic mutagenesis) and thus the amino acid sequences of the VH and VL regions of the recombinant antibodies are sequences that, while derived from and related to human germline VH and VL sequences, may not naturally exist within the human antibody germline repertoire in vivo.

[0228] The term “isotype” refers to the antibody class (e.g., IgM or IgG1) that is encoded by the heavy chain constant region genes. The phrases “an antibody recognizing an antigen” and “an antibody specific for an antigen” are used interchangeably herein with the term “an antibody which binds specifically to an antigen.”

[0229] The term “human antibody derivatives” refers to any modified form of the human antibody, e.g., a conjugate of the antibody and another agent or antibody. The term “humanized antibody” is intended to refer to antibodies in which CDR sequences derived from the germline of another mammalian species, such as a mouse, have been grafted onto human framework sequences. Additional framework region modifications can be made within the human framework sequences.

[0230] The term “chimeric antibody” is intended to refer to antibodies in which the variable region sequences are derived from one species, and the constant region sequences are derived from another species, such as an antibody in which the variable region sequences are derived from a mouse antibody, and the constant region sequences are derived from a human antibody. The term can also refer to an antibody in which its variable region sequence or CDR(s) is derived from one source (e.g., an IgA1 antibody) and the constant region sequence or Fc is derived from a different source (e.g., a different antibody, such as an IgG, IgA2, IgD, IgE or IgM antibody).

[0231] The invention encompasses isolated or substantially purified nucleic acids, peptides, polypeptides or proteins. In the context of the present invention, an “isolated” nucleic acid, DNA or RNA molecule or an “isolated” polypeptide is a nucleic acid, DNA molecule, RNA molecule, or polypeptide that exists apart from its native environment and is therefore not a product of nature. An isolated nucleic acid, DNA molecule, RNA molecule or polypeptide may exist in a purified form or may exist in a non-native environment such as, for example, a transgenic host cell. A “purified” nucleic acid molecule, peptide, polypeptide or protein, or a fragment thereof, is substantially free of other cellular material, or culture medium when produced by recombinant techniques, or substantially free of chemical precursors or other chemicals when chemically synthesized. In one embodiment, an “isolated” nucleic acid is free of sequences that naturally flank the nucleic acid (i.e., sequences located at the 5′ and 3′ ends of the nucleic acid) in the genomic DNA of the organism from which the nucleic acid is derived. For example, in various embodiments, the isolated nucleic acid molecule can contain less than about 5 kb, 4 kb, 3 kb, 2 kb, 1 kb, 0.5 kb, or 0.1 kb of nucleotide sequences that naturally flank the nucleic acid molecule in genomic DNA of the cell from which the nucleic acid is derived. A protein, peptide or polypeptide that is substantially free of cellular material includes preparations of protein, peptide or polypeptide having less than about 30%, 20%, 10%, or 5% (by dry weight) of contaminating protein. When the protein of the invention, or biologically active portion thereof, is recombinantly produced, preferably culture medium represents less than about 30%, 20%, 10%, or 5% (by dry weight) of chemical precursors or non-protein-of-interest chemicals.

[0232] The terms “polypeptide,” “peptide,” and “protein” are used interchangeably herein to refer to polymers of amino acids of any length. The polymer may be linear or branched, it may comprise modified amino acids, and it may be interrupted by non-amino acids. The terms also encompass an amino acid polymer that has been modified; for example, disulfide bond formation, glycosylation, lipidation, acetylation, phosphorylation, pegylation, or any other manipulation, such as conjugation with a labeling component. As used herein, the term “amino acid” includes natural and/or unnatural or synthetic amino acids, including glycine and both the D or L optical isomers, and amino acid analogs and peptidomimetics.

[0233] A peptide or polypeptide “fragment” as used herein refers to a less than full-length peptide, polypeptide or protein. For example, a peptide or polypeptide fragment can have is at least about 3, at least about 4, at least about 5, at least about 10, at least about 20, at least about 30, at least about 40 amino acids in length, or single unit lengths thereof. For example, fragment may be 6, 7, 8, 9, 10, 11, 12, 13, 14, 15, 16, 17, or more amino acids in length. There is no upper limit to the size of a peptide fragment. However, in some embodiments, peptide fragments can be less than about 500 amino acids, less than about 400 amino acids, less than about 300 amino acids or less than about 250 amino acids in length. Preferably the peptide fragment can elicit an immune response when used to inoculate an animal. A peptide fragment may be used to elicit an immune response by inoculating an animal with a peptide fragment in combination with an adjuvant, a peptide fragment that is coupled to an adjuvant, or a peptide fragment that is coupled to arsanilic acid, sulfanilic acid, an acetyl group, or a picryl group. A peptide fragment can include a non-amide bond and can be a peptidomimetic.

[0234] As used herein, the term “conjugate” or “conjugation” or “linked” as used herein refers to the attachment of two or more entities to form one entity. A conjugate encompasses both peptide-small molecule conjugates as well as peptide-protein/peptide conjugates.

[0235] The term “recombinant,” as used herein, refers to antibodies or antigen-binding fragments thereof of the invention created, expressed, isolated or obtained by technologies or methods known in the art as recombinant DNA technology, which include, e.g., DNA splicing and transgenic expression. The term refers to antibodies expressed in a non-human mammal (including transgenic non-human mammals, e.g., transgenic mice), or a cell (e.g., CHO cells) expression system or isolated from a recombinant combinatorial human antibody library.

[0236] A “nucleic acid” or “polynucleotide” refers to a DNA molecule (for example, but not limited to, a cDNA or genomic DNA) or an RNA molecule (for example, but not limited to, an mRNA), and includes DNA or RNA analogs. A DNA or RNA analog can be synthesized from nucleotide analogs. The DNA or RNA molecules may include portions that are not naturally occurring, such as modified bases, modified backbone, deoxyribonucleotides in an RNA, etc. The nucleic acid molecule can be single-stranded or double-stranded.

[0237] The term “substantial identity” or “substantially identical,” when referring to a nucleic acid or fragment thereof, indicates that, when optimally aligned with appropriate nucleotide insertions or deletions with another nucleic acid (or its complementary strand), there is nucleotide sequence identity in at least about 90%, and more preferably at least about 95%, 96%, 97%, 98% or 99% of the nucleotide bases, as measured by any well-known algorithm of sequence identity, such as FASTA, BLAST or GAP, as discussed below. A nucleic acid molecule having substantial identity to a reference nucleic acid molecule may, in certain instances, encode a polypeptide having the same or substantially similar amino acid sequence as the polypeptide encoded by the reference nucleic acid molecule.

[0238] As applied to polypeptides, the term “substantial similarity” or “substantially similar” means that two peptide sequences, when optimally aligned, such as by the programs GAP or BESTFIT using default gap weights, share at least 90% sequence identity, even more preferably at least 95%, 98% or 99% sequence identity. Preferably, residue positions, which are not identical, differ by conservative amino acid substitutions. A “conservative amino acid substitution” is one in which an amino acid residue is substituted by another amino acid residue having a side chain (R group) with similar chemical properties (e.g., charge or hydrophobicity). In general, a conservative amino acid substitution will not substantially change the functional properties of a protein. In cases where two or more amino acid sequences differ from each other by conservative substitutions, the percent or degree of similarity may be adjusted upwards to correct for the conservative nature of the substitution. Means for making this adjustment are well known to those of skill in the art. See, e.g., Pearson (1994) Methods Mol. Biol. 24: 307-331, which is herein incorporated by reference. Examples of groups of amino acids that have side chains with similar chemical properties include 1) aliphatic side chains: glycine, alanine, valine, leucine, and isoleucine; 2) aliphatic-hydroxyl side chains: serine and threonine; 3) amide-containing side chains: asparagine and glutamine; 4) aromatic side chains: phenylalanine, tyrosine, and tryptophan; 5) basic side chains: lysine, arginine, and histidine; 6) acidic side chains: aspartate and glutamate, and 7) sulfur-containing side chains: cysteine and methionine. Preferred conservative amino acids substitution groups are: valine-leucine-isoleucine, phenylalanine-tyrosine, lysine-arginine, alanine-valine, glutamate-aspartate, and asparagine-glutamine. Alternatively, a conservative replacement is any change having a positive value in the PAM250 log-likelihood matrix disclosed in Gonnet et al. (1992) Science 256: 1443 45, herein incorporated by reference. A “moderately conservative” replacement is any change having a nonnegative value in the PAM250 log-likelihood matrix.

[0239] Sequence similarity for polypeptides is typically measured using sequence analysis software. Protein analysis software matches similar sequences using measures of similarity assigned to various substitutions, deletions, and other modifications, including conservative amino acid substitutions. For instance, GCG software contains programs such as GAP and BESTFIT, which can be used with default parameters to determine sequence homology or sequence identity between closely related polypeptides, such as homologous polypeptides from different species of organisms or between a wild type protein and a mutein thereof. See, e.g., GCG Version 6.1. Polypeptide sequences also can be compared using FASTA with default or recommended parameters; a program in GCG Version 6.1. FASTA (e.g., FASTA2 and FASTA3) provides alignments and percent sequence identity of the regions of the best overlap between the query and search sequences (Pearson (2000) supra). Another preferred algorithm when comparing a sequence of the invention to a database containing a large number of sequences from different organisms is the computer program BLAST, especially BLASTP or TBLASTN, using default parameters. See, e.g., Altschul et al. (1990) J. Mol. Biol. 215: 403-410 and (1997) Nucleic Acids Res. 25:3389-3402, each of which is herein incorporated by reference.

[0240] As used herein, the term “affinity” refers to the strength of the sum total of noncovalent interactions between a single binding site of a molecule (e.g., an antibody) and its binding partner (e.g., an antigen). Unless indicated otherwise, as used herein, “binding affinity” refers to intrinsic binding affinity, which reflects a 1:1 interaction between members of a binding pair (e.g., antibody and antigen). The affinity of a molecule X for its partner Y can generally be represented by the dissociation constant (KD). Affinity can be measured by common methods known in the art, including those described herein.

[0241] The term “specifically binds,” or “binds specifically to,” or the like, refers to an antibody that binds to a single epitope, e.g., under physiologic conditions, but which does not bind to more than one epitope. Accordingly, an antibody that specifically binds to a polypeptide will bind to an epitope that present on the polypeptide, but which is not present on other polypeptides. Specific binding can be characterized by an equilibrium dissociation constant of at least about 1×10⁻⁸ M or less (e.g., a smaller KD denotes a tighter binding). Methods for determining whether two molecules specifically bind are well known in the art and include, for example, equilibrium dialysis, surface plasmon resonance, and the like.

[0242] For example, the antibody binds to an epitope with “high affinity,” namely with a KD of 1×10⁻⁷ M or less, more preferably 5×10⁻⁸ M or less, more preferably 3×10⁻⁸ M or less, more preferably 1×10⁻⁸ M or less, more preferably 5×10-9 M or less or even more preferably 1×10⁻⁹ M or less, as determined by surface plasmon resonance, e.g., BIACORE. The term “does not substantially bind” to a protein or cells, as used herein, means does not bind or does not bind with a high affinity to the protein or cells, i.e., binds to the protein or cells with a KD of 1×10⁻⁶ M or more, more preferably 1×10⁻⁵ M or more, more preferably 1×10⁻⁴ M or more, more preferably 1×10⁻³ M or more, even more preferably 1×10⁻² M or more.

[0243] The term “Kassoc” or “Ka,” as used herein, is intended to refer to the association rate of a particular antibody-antigen interaction, whereas the term “Kdis” or “Kd,” as used herein, is intended to refer to the dissociation rate of a particular antibody-antigen interaction. The term “KD,” as used herein, is intended to refer to the dissociation constant, which is obtained from the ratio of Kd to Ka (i.e., Kd/Ka) and is expressed as a molar concentration (M). KD values for antibodies can be determined using methods well established in the art. A preferred method for determining the KD of an antibody is by using surface plasmon resonance, preferably using a biosensor system such as a BIACORE system.

[0244] Antibodies that “compete with another antibody for binding to a target” refer to antibodies that inhibit (partially or completely) the binding of the other antibody to the target. Whether two antibodies compete with each other for binding to a target, i.e., whether and to what extent one antibody inhibits the binding of the other antibody to a target, may be determined using known competition experiments. In some embodiments, an antibody competes with, and inhibits binding of another antibody to a target by at least 10%, 20%, 30%, 40%, 50%, 60%, 70%, 80%, 90% or 100%. The level of inhibition or competition may be different depending on which antibody is the “blocking antibody” (i.e., the cold antibody that is incubated first with the target). Competition assays can be conducted as described, for example, in Ed Harlow and David Lane, Cold Spring Harb Protoc; 2006 or in Chapter 11 of “Using Antibodies” by Ed Harlow and David Lane, Cold Spring Harbor Laboratory Press, Cold Spring Harbor, NY, USA 1999. Competing antibodies bind to the same epitope, an overlapping epitope or to adjacent epitopes (e.g., as evidenced by steric hindrance). Other competitive binding assays include: solid-phase direct or indirect radioimmunoassay (RIA), solid-phase direct or indirect enzyme immunoassay (EIA), sandwich competition assay (see Stahli et al., Methods in Enzymology 9:242 (1983)); solid-phase direct biotin-avidin EIA (see Kirkland et al., J. Immunol. 137:3614 (1986)); solid-phase direct labeled assay, solid-phase direct labeled sandwich assay (see Harlow and Lane, Antibodies: A Laboratory Manual, Cold Spring Harbor Press (1988)); solid-phase direct label RIA using 1-125 label (see Morel et al., Mol. Immunol. 25(1):7 (1988)); solid-phase direct biotin-avidin EIA (Cheung et al., Virology 176:546 (1990)); and direct labeled RIA. (Moldenhauer et al., Scand. J. Immunol. 32:77 (1990)).

[0245] The term “epitope” as used herein refers to an antigenic determinant that interacts with a specific antigen-binding site in the variable region of an antibody molecule known as a paratope. A single antigen may have more than one epitope. Thus, different antibodies may bind to different areas on an antigen and may have different biological effects. The term “epitope” also refers to a site on an antigen to which B and/or T cells respond. It also refers to a region of an antigen that is bound by an antibody. Epitopes may be defined as structural or functional. Functional epitopes are generally a subset of the structural epitopes and have those residues that directly contribute to the affinity of the interaction. Epitopes may also be conformational, that is, composed of non-linear amino acids. In some embodiments, epitopes may include determinants that are chemically active surface groupings of molecules such as amino acids, sugar side chains, phosphoryl groups, or sulfonyl groups, and, In some embodiments, may have specific three-dimensional structural characteristics and/or specific charge characteristics. An epitope typically includes at least 3, 4, 5, 6, 7, 8, 9, 10, 11, 12, 13, 14 or 15 amino acids in a unique spatial conformation. Methods for determining what epitopes are bound by a given antibody (i.e., epitope mapping) are well known in the art. Methods of determining spatial conformation of epitopes include techniques in the art and those described herein, for example, x-ray crystallography and 2-dimensional nuclear magnetic resonance (see, e.g., Epitope Mapping Protocols in Methods in Molecular Biology, Vol. 66, G. E. Morris, Ed. (1996)).

[0246] The term “epitope mapping” refers to the process of identification of the molecular determinants for antibody-antigen recognition.

[0247] The term “binds to an epitope” or “recognizes an epitope” with reference to an antibody or antibody fragment refers to continuous or discontinuous segments of amino acids within an antigen. Those of skill in the art understand that the terms do not necessarily mean that the antibody or antibody fragment is in direct contact with every amino acid within an epitope sequence.

[0248] The term “binds to the same epitope” with reference to two or more antibodies means that the antibodies bind to the same, overlapping or encompassing continuous or discontinuous segments of amino acids. Those of skill in the art understand that the phrase “binds to the same epitope” does not necessarily mean that the antibodies bind to or contact exactly the same amino acids. The precise amino acids that the antibodies contact can differ. For example, a first antibody can bind to a segment of amino acids that is completely encompassed by the segment of amino acids bound by a second antibody. In another example, a first antibody binds one or more segments of amino acids that significantly overlap the one or more segments bound by the second antibody. For the purposes herein, such antibodies are considered to “bind to the same epitope.”

[0249] As used herein, the term “immune response” refers to a biological response within a vertebrate against foreign agents, which response protects the organism against these agents and diseases caused by them. An immune response is mediated by the action of a cell of the immune system (for example, a T lymphocyte, B lymphocyte, natural killer (NK) cell, macrophage, eosinophil, mast cell, dendritic cell or neutrophil) and soluble macromolecules produced by any of these cells or the liver (including antibodies, cytokines, and complement) that results in selective targeting, binding to, damage to, destruction of, and/or elimination from the vertebrate's body of invading pathogens, cells or tissues infected with pathogens, cancerous or other abnormal cells, or, in cases of autoimmunity or pathological inflammation, normal human cells or tissues. An immune reaction includes, e.g., activation or inhibition of a T cell, e.g., an effector T cell or a Th cell, such as a CD4+ or CD8+ T cell, or the inhibition of a Treg cell.

[0250] The term “detectable label” as used herein refers to a molecule capable of detection, including, but not limited to, radioactive isotopes, fluorescers, chemiluminescers, chromophores, enzymes, enzyme substrates, enzyme cofactors, enzyme inhibitors, chromophores, dyes, metal ions, metal sols, ligands (e.g., biotin, avidin, streptavidin or haptens), intercalating dyes and the like. The term “fluorescer” refers to a substance or a portion thereof that is capable of exhibiting fluorescence in the detectable range.

[0251] In many embodiments, the terms “subject” and “patient” are used interchangeably irrespective of whether the subject has or is currently undergoing any form of treatment. As used herein, the terms “subject” and “subjects” may refer to any vertebrate, including, but not limited to, a mammal (e.g., cow, pig, camel, llama, horse, goat, rabbit, sheep, hamsters, guinea pig, cat, dog, rat, and mouse, a non-human primate (for example, a monkey, such as a cynomolgus monkey, chimpanzee, etc.) and a human). The subject may be a human or a non-human. In more exemplary aspects, the mammal is a human. As used herein, the expression “a subject in need thereof” or “a patient in need thereof” means a human or non-human mammal that exhibits one or more symptoms or indications of disorders (e.g., neuronal disorders, autoimmune diseases, and cardiovascular diseases), and/or who has been diagnosed with inflammatory disorders. In some embodiments, the subject is a mammal. In some embodiments, the subject is human.

[0252] As used herein, the term “disease” is intended to be generally synonymous and is used interchangeably with, the terms “disorder” and “condition” (as in medical condition), in that all reflect an abnormal condition (e.g., inflammatory disorder) of the human or animal body or of one of its parts that impairs normal functioning, is typically manifested by distinguishing signs and symptoms, and causes the human or animal to have a reduced duration or quality of life.

[0253] As used herein, the term “treating” or “treatment” of any disease or disorder refers in one embodiment, to ameliorating the disease or disorder (i.e., arresting or reducing the development of the disease or at least one of the clinical symptoms thereof). In another embodiment, “treating” or “treatment” refers to ameliorating at least one physical parameter, which may not be discernible by the patient. In yet another embodiment, “treating” or “treatment” refers to modulating the disease or disorder, either physically, (e.g., stabilization of a discernible symptom), physiologically, (e.g., stabilization of a physical parameter), or both. In yet another embodiment, “treating” or “treatment” refers to preventing or delaying the onset or development or progression of the disease or disorder.

[0254] The terms “prevent,” “preventing,” “prevention,” “prophylactic treatment” and the like refer to reducing the probability of developing a disorder or condition in a subject, who does not have, but is at risk of or susceptible to developing a disorder or condition.

[0255] The terms “decrease,” “reduced,” “reduction,” “decrease,” or “inhibit” are all used herein generally to mean a decrease by a statistically significant amount. However, for avoidance of doubt, “reduced,” “reduction” or “decrease” or “inhibit” means a decrease by at least 10% as compared to a reference level, for example, a decrease by at least about 20%, or at least about 30%, or at least about 40%, or at least about 50%, or at least about 60%, or at least about 70%, or at least about 80%, or at least about 90% or up to and including a 100% decrease (e.g., absent level as compared to a reference sample), or any decrease between 10-100% as compared to a reference level.

[0256] As used herein, the term “agent” denotes a chemical compound, a mixture of chemical compounds, a biological macromolecule (such as a nucleic acid, an antibody, a protein or portion thereof, e.g., a peptide), or an extract made from biological materials such as bacteria, plants, fungi, or animal (particularly mammalian) cells or tissues. The activity of such agents may render it suitable as a “therapeutic agent,” which is a biologically, physiologically, or pharmacologically active substance (or substances) that acts locally or systemically in a subject.

[0257] As used herein, the terms “therapeutic agent,” “therapeutic capable agent,” or “treatment agent” are used interchangeably and refer to a molecule or compound that confers some beneficial effect upon administration to a subject. The beneficial effect includes enablement of diagnostic determinations; amelioration of a disease, symptom, disorder, or pathological condition; reducing or preventing the onset of a disease, symptom, disorder, or condition; and generally counteracting a disease, symptom, disorder or pathological condition.

[0258] The term “therapeutic effect” is art-recognized and refers to a local or systemic effect in animals, particularly mammals, and more particularly humans caused by a pharmacologically active substance.

[0259] The term “effective amount,” “effective dose,” or “effective dosage” is defined as an amount sufficient to achieve or at least partially achieve a desired effect. A “therapeutically effective amount” or “therapeutically effective dosage” of a drug or therapeutic agent is any amount of the drug that, when used alone or in combination with another therapeutic agent, promotes disease regression evidenced by a decrease in severity of disease symptoms, an increase in frequency and duration of disease symptom-free periods, or a prevention of impairment or disability due to the disease affliction. A “prophylactically effective amount” or a “prophylactically effective dosage” of a drug is an amount of the drug that, when administered alone or in combination with another therapeutic agent to a subject at risk of developing a disease or of suffering a recurrence of disease, inhibits the development or recurrence of the disease. The ability of a therapeutic or prophylactic agent to promote disease regression or inhibit the development or recurrence of the disease can be evaluated using a variety of methods known to the skilled practitioner, such as in human subjects during clinical trials, in animal model systems predictive of efficacy in humans, or by assaying the activity of the agent in in vitro assays.

[0260] Doses are often expressed in relation to bodyweight. Thus, a dose which is expressed as [g, mg, or other unit]/kg (or g, mg etc.) usually refers to [g, mg, or other unit] “per kg (or g, mg etc.) bodyweight,” even if the term “bodyweight” is not explicitly mentioned.

[0261] As used herein, the term “composition” or “pharmaceutical composition” refers to a mixture of at least one component useful within the invention with other components, such as carriers, stabilizers, diluents, dispersing agents, suspending agents, thickening agents, and/or excipients. The pharmaceutical composition facilitates administration of one or more components of the invention to an organism.

[0262] As used herein, the term “pharmaceutically acceptable” refers to a material, such as a carrier or diluent, which does not abrogate the biological activity or properties of the composition, and is relatively non-toxic, i.e., the material may be administered to an individual without causing undesirable biological effects or interacting in a deleterious manner with any of the components of the composition in which it is contained.

[0263] As used herein, the term “pharmaceutically acceptable carrier” includes a pharmaceutically acceptable salt, pharmaceutically acceptable material, composition or carrier, such as a liquid or solid filler, diluent, excipient, solvent or encapsulating material, involved in carrying or transporting a compound(s) of the present invention within or to the subject such that it may perform its intended function. Typically, such compounds are carried or transported from one organ, or portion of the body, to another organ, or portion of the body. Each salt or carrier must be “acceptable” in the sense of being compatible with the other ingredients of the formulation and not injurious to the subject. Some examples of materials that may serve as pharmaceutically acceptable carriers include: sugars, such as lactose, glucose, and sucrose; starches, such as corn starch and potato starch; cellulose, and its derivatives, such as sodium carboxymethyl cellulose, ethyl cellulose, and cellulose acetate; powdered tragacanth; malt; gelatin; talc; excipients, such as cocoa butter and suppository waxes; oils, such as peanut oil, cottonseed oil, safflower oil, sesame oil, olive oil, corn oil, and soybean oil; glycols, such as propylene glycol; polyols, such as glycerin, sorbitol, mannitol, and polyethylene glycol; esters, such as ethyl oleate and ethyl laurate; agar; buffering agents, such as magnesium hydroxide and aluminum hydroxide; alginic acid; pyrogen-free water; isotonic saline; Ringer's solution; ethyl alcohol; phosphate buffer solutions; diluent; granulating agent; lubricant; binder; disintegrating agent; wetting agent; emulsifier; coloring agent; release agent; coating agent; sweetening agent; flavoring agent; perfuming agent; preservative; antioxidant; plasticizer; gelling agent; thickener; hardener; setting agent; suspending agent; surfactant; humectant; carrier; stabilizer; and other non-toxic compatible substances employed in pharmaceutical formulations, or any combination thereof. As used herein, “pharmaceutically acceptable carrier” also includes any and all coatings, antibacterial and antifungal agents, and absorption delaying agents, and the like that are compatible with the activity of one or more components of the invention, and are physiologically acceptable to the subject. Supplementary active compounds may also be incorporated into the compositions.

[0264] “Combination” therapy, as used herein, unless otherwise clear from the context, is meant to encompass administration of two or more therapeutic agents in a coordinated fashion and includes, but is not limited to, concurrent dosing. Specifically, combination therapy encompasses both co-administration (e.g., administration of a co-formulation or simultaneous administration of separate therapeutic compositions) and serial or sequential administration, provided that administration of one therapeutic agent is conditioned in some way on the administration of another therapeutic agent. For example, one therapeutic agent may be administered only after a different therapeutic agent has been administered and allowed to act for a prescribed period of time. See, e.g., Kohrt et al. (2011) Blood 117:2423.

[0265] As used herein, the term “co-administration” or “co-administered” refers to the administration of at least two agent(s) or therapies to a subject. In some embodiments, the co-administration of two or more agents/therapies is concurrent. In other embodiments, a first agent/therapy is administered prior to a second agent/therapy. Those of skill in the art understand that the formulations and/or routes of administration of the various agents/therapies used may vary.

[0266] As used herein, the term “contacting,” when used in reference to any set of components, includes any process whereby the components to be contacted are mixed into the same mixture (for example, are added into the same compartment or solution), and does not necessarily require actual physical contact between the recited components. The recited components can be contacted in any order or any combination (or sub-combination) and can include situations where one or some of the recited components are subsequently removed from the mixture, optionally prior to addition of other recited components. For example, “contacting A with B and C” includes any and all of the following situations: (i) A is mixed with C, then B is added to the mixture; (ii) A and B are mixed into a mixture; B is removed from the mixture, and then C is added to the mixture; and (iii) A is added to a mixture of B and C.

[0267] “Sample,” “test sample,” and “patient sample” may be used interchangeably herein. The sample can be a sample of serum, urine plasma, amniotic fluid, cerebrospinal fluid, cells, or tissue. Such a sample can be used directly as obtained from a patient or can be pre-treated, such as by filtration, distillation, extraction, concentration, centrifugation, inactivation of interfering components, addition of reagents, and the like, to modify the character of the sample in some manner as discussed herein or otherwise as is known in the art. The terms “sample” and “biological sample” as used herein generally refer to a biological material being tested for and/or suspected of containing an analyte of interest such as antibodies. The sample may be any tissue sample from the subject. The sample may comprise protein from the subject.

[0268] As used herein, the term “in vitro” refers to events that occur in an artificial environment, e.g., in a test tube or reaction vessel, in cell culture, etc., rather than within a multi-cellular organism.

[0269] As used herein, the term “in vivo” refers to events that occur within a multi-cellular organism, such as a non-human animal.

[0270] As used herein, the singular forms “a,” “an,” and “the” include plural references unless the context clearly dictates otherwise.

[0271] As used herein, the terms “including,” “comprising,” “containing,” or “having” and variations thereof are meant to encompass the items listed thereafter and equivalents thereof as well as additional subject matter unless otherwise noted.

[0272] As used herein, the phrases “in one embodiment,” “in various embodiments,” “in some embodiments,” and the like are used repeatedly. Such phrases do not necessarily refer to the same embodiment, but they may unless the context dictates otherwise.

[0273] As used herein, the terms “and/or” or “/” means any one of the items, any combination of the items, or all of the items with which this term is associated.

[0274] As used herein, the word “substantially” does not exclude “completely,” e.g., a composition which is “substantially free” from Y may be completely free from Y. Where necessary, the word “substantially” may be omitted from the definition of the invention.

[0275] As used herein, the term “each,” when used in reference to a collection of items, is intended to identify an individual item in the collection but does not necessarily refer to every item in the collection. Exceptions can occur if explicit disclosure or context clearly dictates otherwise.

[0276] As used herein, the term “approximately” or “about,” as applied to one or more values of interest, refers to a value that is similar to a stated reference value. In some embodiments, the term “approximately” or “about” refers to a range of values that fall within 25%, 20%, 19%, 18%, 17%, 16%, 15%, 4%1, 3%1, 12%, 11%, 10%, 9%, 8%, 7%, 6%, 5%, 4%, 3%, 2%, 1%, or less in either direction (greater than or less than) of the stated reference value unless otherwise stated or otherwise evident from the context (except where such number would exceed 100% of a possible value). Unless indicated otherwise herein, the term “about” is intended to include values, e.g., weight percents, proximate to the recited range that are equivalent in terms of the functionality of the individual ingredient, the composition, or the embodiment.

[0277] As disclosed herein, a number of ranges of values are provided. It is understood that each intervening value, to the tenth of the unit of the lower limit, unless the context clearly dictates otherwise, between the upper and lower limits of that range is also specifically disclosed. Each smaller range between any stated value or intervening value in a stated range and any other stated or intervening value in that stated range is encompassed within the invention. The upper and lower limits of these smaller ranges may independently be included or excluded in the range, and each range where either, neither, or both limits are included in the smaller ranges is also encompassed within the invention, subject to any specifically excluded limit in the stated range. Where the stated range includes one or both of the limits, ranges excluding either or both of those included limits are also included in the invention.

[0278] The use of any and all examples, or exemplary language (e.g., “such as”) provided herein, is intended merely to better illuminate the invention and does not pose a limitation on the scope of the invention unless otherwise claimed. No language in the specification should be construed as indicating any non-claimed element as essential to the practice of the invention.

[0279] All methods described herein are performed in any suitable order unless otherwise indicated herein or otherwise clearly contradicted by context. In regard to any of the methods provided, the steps of the method may occur simultaneously or sequentially. When the steps of the method occur sequentially, the steps may occur in any order, unless noted otherwise. In cases in which a method comprises a combination of steps, each and every combination or sub-combination of the steps is encompassed within the scope of the disclosure, unless otherwise noted herein.

[0280] Each publication, patent application, patent, and other reference cited herein is incorporated by reference in its entirety to the extent that it is not inconsistent with the present disclosure. Publications disclosed herein are provided solely for their disclosure prior to the filing date of the present invention. Nothing herein is to be construed as an admission that the present invention is not entitled to antedate such publication by virtue of prior invention. Further, the dates of publication provided may be different from the actual publication dates, which may need to be independently confirmed.

[0281] It is understood that the examples and embodiments described herein are for illustrative purposes only and that various modifications or changes in light thereof will be indicated to persons skilled in the art and are to be included within the spirit and purview of this application and scope of the appended claims.

### F. Examples

### Example 1

[0282] This example describes the materials and methods used in the subsequent EXAMPLES below.

[0283] Human Subjects and Clinical Information

[0284] Samples of peripheral blood were obtained upon consent from individuals previously hospitalized with confirmed TBEV infection or from individuals previously vaccinated against TBEV in České Budějovice, Czech Republic, under protocols approved by the ethical committees of the Hospital in České Budějovice (approval No. 103/19), the Biology Center of the Czech Academy of Sciences (approval No. 1/2018) and the Rockefeller University (IRB DRO-0984). Clinical data were obtained at the treating hospital, and severity of disease was evaluated according to the following scale: mild, flu-like symptoms with meningeal irritation defined as meningitis, characterized by fever, fatigue, nausea, headache, back pain, arthralgia/myalgia, and neck or back stiffness; moderate, previous symptoms together with tremor, vertigo, somnolence and photophobia defined as meningoencephalitis; severe, prolonged neurological consequences including ataxia, titubation, altered mental status, memory loss, quantitative disturbance of consciousness, and palsy revealed as encephalitis, encephalomyelitis, or encephalomyeloradiculitis (Bogovic, P., and Strle, F., (2015) World J Clin Cases 3, 430-441; Ruzek, D., et al., (2019) Antiviral Res 164, 23-51).

[0285] Blood Samples Processing and Storage

[0286] Peripheral Blood Mononuclear Cells (PBMCs) were obtained by gradient centrifugation using Ficoll and stored in liquid nitrogen in freezing media (90% FCS, 10% DMSO). Prior to experiments, aliquots of sera (from infected, vaccinated, and random blood bank donors) were heat-inactivated at 56° C. for 1 hour and then stored at 4° C.

[0287] Protein Expression and Purification

[0288] EDIII antigens were expressed in E. coli and purified from inclusion bodies as previously reported (Robbiani, D. F., et al., (2017) Cell 169, 597-609 e511); Sapparapu, G., et al., (2016) Nature 540, 443-447). Expression vectors containing codon-optimized sequences encoding residues 299-397 for TBEV strain Neudoerfl (TBEV^{WE}; NC_001672.1) or 301-397 for strains Sofjin (TBEV^{FE}; UniProtKB P07720) and Vasilchenko (TBEV^{Si}; AF069066) were used to produce untagged EDIII proteins or EDIII proteins containing a C-terminal 6×His-Avitag. Constructs encoding untagged EDIIIs of other tick-borne flaviviruses were constructed similarly (POWV strain LB, GenBank L04636.1; POWV isolate DTV; KFDV strain W-377, JF416960.1; LGTV strain TP21-636, NC_003690.1; LIV isolate LI3/1, KP144331.1; OHFV strain Bogoluvovska, NC_005062). Expression plasmids were transformed into BL21(DE3) E. coli and induced with 1 mM isopropyl β-D-1-thiogalactopyranoside (IPTG) at 37° C. for 4 hours. The cells were lysed and the insoluble fraction containing inclusion bodies was solubilized and refolded in 400 mM L-arginine, 100 mM Tris-base pH 8.0, 2 mM EDTA, 0.2 mM phenyl-methylsulfonyl fluoride, 5 mM reduced and 0.5 mM oxidized glutathione, and 10% glycerol at 4° C. Refolded protein was purified by size exclusion chromatography (Superdex 75; Cytiva) in 20 mM Tris pH 8.0, 150 mM NaCl, 0.02% NaN₃. EDIIIs were concentrated to 10-20 mg/mL.

[0289] T025 F(ab)s for structural studies were produced and purified as described in previous studies (Keeffe, J. R., et al., (2018) Cell Rep 25, 1385-1394.e1387; Robbiani, D. F., et al., (2017) Cell 169, 597-609 e511; Robbiani, D. F., et al., (2020) Nature 584, 437-442; Wang, Q., et al., (2020) Cell Host Microbe 28, 335-349.e336). Briefly, F(ab)s containing a 6×His purification tag (SEQ ID NO: 6668) at the C-terminus of the heavy chain were expressed by transiently transfecting Expi293 cells (Life Technologies) with appropriate heavy and light chain plasmids. His-tagged F(ab)s were purified from expression supernatants using Ni-NTA affinity chromatography (Cytiva) followed by size exclusion chromatography (Superdex 200; Cytiva) in 20 mM Tris pH 8.0, 150 mM NaCl, 0.02% NaN₃. Fabs were concentrated to approximately 15 mg/mL.

[0290] Sequence Analysis

[0291] Antibody sequences were analyzed as described previously (Robbiani, D. F., et al., (2020) Nature 584, 437-442); in particular, sequences were trimmed and annotated using Igblastn v.1.14.0 (Ye, J., et al., (2013) Nucleic Acids Research 41, W34-W40) and Change-O toolkit v.0.4.5 (Gupta, N. T., et al., (2015) Bioinformatics 31, 3356-3358). Sequences from the same cell were paired and assigned clonotypes based on V and J genes using in-house R and Perl scripts, available on GitHub (https://github.com/stratust/igpipeline). Nucleotide somatic hypermutation and CDR3 length were also analyzed using in-house R and Perl scripts, as described previously (Robbiani, D. F., et al., (2020) Nature 584, 437-442); hypermutation analysis was based on the closest germlines in Igblastn. Hydrophobicity GRAVY scores were calculated using Guy H. R. Hydrophobicity scale (Guy, H. R. (1985) Biophysical Journal 47, 61-70; Kyte, J., and Doolittle, R. F., (1982) J Mol Biol 157, 105-132) and R package Peptides (https.//journal.r-project.org/archive/2015/RJ-2015-001/RJ-2015-001.pdf), based on 776 IGH CDR3 sequences from this study and 22,654,256 IGH CDR3 sequences from public databases of memory B cell receptor sequences (DeWitt, W. S., et al., (2016) PLOS ONE 11, e0160853). Distribution was determined using the Shapiro-Wilk test with all CDR3 sequence GRAVY scores from this study and 5,000 randomly selected GRAVY scores from the public database. The Wilcoxon nonparametric test was used to test for the significant difference in hydrophobicity.

[0292] Frequency distributions of V genes in anti-TBEV antibodies from 6 infected donors were compared to Sequence Read Archive accession SRP010970 (Rubelt, F., et al., (2012) PLoS One 7, e49774). V gene assignments were based on the above-described analysis, and frequencies were calculated for 6 infected donors using sequences with unique CDR3s. Statistical significance was determined using two-tailed t-tests with unequal variances. Sequence logos were generated from left-aligned CDR3 sequences from each antibody set using WebLogo (Crooks, G. E., et al., (2004) Genome Res 14, 1188-1190).

[0293] Protein Biotinylation

[0294] Avi-tagged TBEV^{FE} EDIII was biotinylated using the Biotin-Protein Ligase BIRA kit according to the manufacturer's instructions (Avidity) and conjugated to streptavidin-PE (BD Biosciences, 554061) and streptavidin-Alexa Fluor 647 (Biolegend, 405237). Ovalbumin (Sigma, A5503-1G) was biotinylated using the EZ Sulfo-NHS-LC-Biotinylation kit according to the manufacturer's instructions (Thermo Scientific, A39257) and conjugated to streptavidin BV711 (BD Biosciences, 563262). Biotinylation was confirmed by ELISA prior to use in flow cytometry.

[0295] Single-Cell Sorting

[0296] PBMCs from sample 111 were enriched for B cells via positive selection using CD19 microbeads (Miltenyi Biotec, 130-050-301). PBMCs from all other donors were enriched for B cells by negative selection (Miltenyi Biotec, 130-101-638). All selection protocols were performed according to the manufacturer's instructions. Enriched B cells were incubated for 30 minutes on ice in FACS buffer (1× Phosphate-buffered saline (PBS), 2% calf serum, 1 mM EDTA) with fluorophore-labeled EDIII and ovalbumin, and in the presence of anti-human antibodies anti-CD3-APC-eFluro 780 (Invitrogen, 47-0037-41), anti-CD8-APC-eFluro 780 (Invitrogen, 47-0086-42), anti-CD14-APC-eFluro 780 (Invitrogen, 47-0149-42), anti-CD16-APC-eFluro 780 (Invitrogen, 47-0168-41), anti-CD20-PECy7 (BD Biosciences, 335793), and Zombie NIR (BioLegend, 423105). Single CD3⁻CD8⁻CD14⁻CD16⁻ZombieNIR⁻CD20⁺Ova⁻EDIII-PE⁺EDIII-AF647⁺ B cells were sorted using a FACS Aria III (Becton Dickinson) into individual wells of 96-well plates. Each well contained 4 L of a lysis buffer comprising 0.5×PBS, 10 mM DTT, and 3000 units/mL RNasin Ribonuclease Inhibitors (Promega, N2615). Sorted cells were snap-frozen on dry ice and then stored at −80° C. Antibody sequences are derived from memory B cells because they originate from small CD20⁺ cells, and the antibody genes were PCR-amplified using IgG-specific primers.

[0297] Antibody Sequencing, Cloning, and Expression

[0298] RNA from single cells was reverse transcribed using SuperScript III Reverse Transcriptase (Invitrogen, 18080-044). The resulting cDNA was stored at −20° C. until amplification of the variable IGH, IGL, and IGK genes by nested PCR followed by Sanger sequencing. Amplicons from the first PCR reaction were used as a template for nested PCR-amplification and Sequence- and Ligation-Independent Cloning (SLIC) into antibody expression vectors as previously described (Robbiani, D. F., et al., (2020) Nature 584, 437-442). Recombinant monoclonal antibodies were produced and purified as previously detailed (Klein, F., et al., (2014) J Exp Med 211, 2361-2372). The T036 F(ab) and F(ab′)2 were generated using the Pierce™ Fab Preparation kit (Thermo Scientific, 44988).

[0299] Plasmids for the Production of Reporter Virus Particle (RVP)

[0300] A West Nile virus subgenomic replicon-expressing plasmid encoding Renilla luciferase (pWNVII-Rep-REN-IB) and a ZIKV CprME expression plasmid had previously been obtained from Ted Pierson (NIH) (Pierson, T. C., et al., (2006) Virology 346, 53-65; Robbiani, D. F., et al., (2017) Cell 169, 597-609 e511). The ZIKV CprME expression plasmid was manipulated by restriction enzyme digestion and ligation to express the CprME of other flaviviruses as follows:

[0301] TBEV: synthetic DNA with CprME coding sequence (flanked at the 5′ by the polylinker and Kozak sequence GGAATTCGCGGCCGCCTCAGG (SEQ ID NO: 237) and at the 3′ by the stop codons and polylinker TAATAGTTAATTAACTCGAGCCGCGG (SEQ ID NO: 6667); “CprME-flanked”) corresponding to tick-borne encephalitis virus, Western European subtype strain Neudoerfl (GenBank NC_001672), was amplified with primers DFRp1532 (5-GGAATTCGCGGCCGCCTCAGG) (SEQ ID NO: 238) and DFRp1533 (5-GCGGCTCGAGTTAATTAA) (SEQ ID NO: 239) before cloning at the NotI and PacI sites of plasmid pPOWV-LB-CprME (see below), resulting in pTBEV-WE-CprME.

[0302] POWV-LB: synthetic DNA containing the CprME sequence (underlined) of POWV LB strain (GenBank: L06436.1 with 4 synonymous changes, in lowercase and bold, to reduce complexity;

(SEQ ID NO: 240)
CTACTTGGCAGTACATCTACGTATTAGTCATCGCTATTACCATGGTGAT
GCGGTTTTGGCAGTACATCAATGGGCGTGGATAGCGGTTTGACTCACGG
GGATTTCCAAGTCTCCACCCCATTGACGTCAATGGGAGTTTGTTTTGGC
ACCAAAATCAACGGGACTTTCCAAAATGTCGTAACAACTCCGCCCCATT
GACGCAAATGGGCGGTAGGCGTGTACGGTGGGAGGTCTATATAAGCAGA
GCTCTCTGGCTAACTAGAGAACCCACTGCTTACTGGCTTATCGAAATTA
ATACGACTCACTATAGGGAGACCCAAGCTGGCTAGTTAAGCTATCAACA
AGGAATTCGCGGCCGCCAGGCTATGATGACCACTTCTAAAGGAAAGGGG
GGCGGTCCCCCTAGGCGCAAGCTTAAAGTGACCGCAAATAAGTCGCGAC
CAGCAACGAGCCCAATGCCAAAGGGCTTCGTGCTGTCGCGCATGCTGGG
GATTCTTTGGCACGCCGTGACAGGCACGGCCAGACCCCCAGTGCTGAAA
ATGTTCTGGAAAACGGTACCACTGCGCCAGGCGGAGGCTGTTCTGAAGA
AGATAAAGAGAGTTATCGGGAACTTGATGCAGAGCCTTCACATGAGAGG
GCGTCGCAGGTCAGGTGTGGACTGGACTTGGATTTTTTTGACGATGGCG
TTGATGACCATGGCCATGGCAACCACCATCCACCGGGACAGGGAAGGAT
ACATGGTTATGCGGGCCAGTGGAAGGGACGCTGCAAGCCAGGTCAGGGT
ACAAAACGGAACGTGCGTCATCCTGGCAACAGACATGGGAGAGTGGTGT
GAAGATTCAATCACCTACTCTTGCGTCACGATTGACCAGGAGGAAGAAC
CCGTTGACGTGGACTGCTTCTGCCGAGGTGTTGATAGGGTTAAGTTAGA
GTATGGACGCTGTGGAAGGCAAGCTGGATCTAGGGGGAAAAGGTCTGTG
GTCATTCCAACACATGCACAAAAAGACATGGTCGGGCGAGGTCATGCAT
GGCTTAAAGGTGACAATATTCGAGATCATGTCACCCGAGTCGAGGGCTG
GATGTGGAAGAACAAGCTTCTAACTGCCGCCATTGTGGCCTTGGCTTGG
CTCATGGTTGATAGTTGGATGGCCAGAGTGACTGTCATCCTCTTGGCGT
TGAGTCTAGGGCCAGTGTACGCCACGAGGTGCACGCATCTTGAGAACAG
AGATTTTGTGACAGGAACTCAAGGGACCACCAGAGTGTCCCTAGTTTTG
GAACTTGGAGGCTGCGTGACCATCACAGCTGAGGGCAAGCCATCCATTG
ATGTATGGCTCGAAGACATTTTTCAGGAAAGCCCGGCTGAAACCAGAGA
ATACTGCCTGCACGCCAAATTGACCAACACAAAAGTGGAGGCTCGCTGT
CCAACCACTGGACCGGCGACACTTCCGGAGGAGCATCAGGCTAATATGG
TGTGCAAGAGAGACCAAAGCGACCGTGGATGGGGAAACCACTGtGGaTT
cTTcGGGAAGGGCAGTATAGTGGCTTGTGCAAAGTTTGAATGCGAGGAA
GCAAAAAAAGCTGTGGGCCACGTCTATGACTCCACAAAGATCACGTATG
TTGTCAAGGTTGAGCCCCACACAGGGGATTACTTGGCTGCAAATGAGAC
CAATTCAAACAGGAAATCAGCACAGTTTACGGTGGCATCCGAGAAAGTG
ATCCTGCGGCTCGGCGACTATGGAGATGTGTCGCTGACGTGTAAAGTGG
CAAGTGGGATTGATGTCGCCCAAACTGTGGTGATGTCACTCGACAGCAG
CAAGGACCACCTGCCTTCTGCATGGCAAGTGCACCGTGACTGGTTTGAG
GACTTGGCGCTGCCCTGGAAACACAAGGACAACCAAGATTGGAACAGTG
TGGAGAAACTTGTGGAATTTGGACCACCACATGCTGTGAAAATGGATGT
TTTCAATCTGGGGGACCAGACGGCTGTGCTGCTCAAATCACTGGCAGGA
GTTCCGCTGGCCAGTGTGGAGGGCCAGAAATACCACCTGAAAAGCGGCC
ATGTTACTTGTGATGTGGGACTGGAAAAGCTGAAACTGAAAGGCACAAC
CTACTCCATGTGTGACAAAGCAAAGTTCAAATGGAAGAGAGTTCCTGTG
GACAGCGGCCATGACACAGTAGTCATGGAGGTATCATACACAGGAAGCG
ACAAGCCATGTCGGATCCCGGTGCGGGCTGTGGCACATGGTGTCCCAGC
GGTTAATGTAGCCATGCTCATAACCCCCAATCCAACCATTGAAACAAAT
GGTGGCGGATTCATAGAAATGCAGCTGCCACCAGGGGATAACATCATCT
ATGTGGGAGACCTTAGCCAGCAGTGGTTTCAGAAAGGCAGTACCATTGG
TAGAATGTTTGAAAAAACCCGCAGGGGATTGGAAAGGCTCTCTGTGGTT
GGAGAACATGCATGGGACTTTGGCTCAGTAGGCGGGGTACTGTCTTCTG
TGGGGAAGGCAATCCACACGGTGCTGGGGGGAGCTTTCAACACCCTTTT
TGGTGGTGTTGGATTCATCCCTAAGATGCTGCTGGGGGTTGCTCTGGTC
TGGTTGGGACTAAATGCCAGGAATCCAACGATGTCCATGACGTTTCTTG
CTGTGGGGGCTTTGACACTGATGATGACAATGGGAGTTGGGGCATAATA
GTTAATTAACTCGAGCCGCGGTTCGAAGGTAAGCCT)

was PCR-amplified with primers DFRp1511 (5-ATCTACGTATTAGTCATCGCTATTA) (SEQ ID NO: 241) and DFRp1514 (5-ACCGCGGCTCGAGTTAATTAA) (SEQ ID NO: 242) and cloned at the Eco105I and SacII sites of plasmid pZIKV—HPF-CprME (Robbiani, D. F., et al., (2017) 169, 597-609 e511), resulting in pPOWV-LB-CprME.

[0303] POWV-DTV: A three-piece assembly PCR strategy was utilized. DNA upstream of the CMV promoter in pZIKV—HFP-CprME to just downstream of the beginning of the C-encoding region was PCR-amplified with primers RU-O-24611 (5′-CTTGACCGACAATTGCATGAAG-3′) (SEQ ID NO: 243) and RU-O-26690 (5′-CTTTCCTTTAGAAGTAGTCACCATAGCCTGCTTTTTTGTACAAAC-3′) (SEQ ID NO: 244), resulting in a fragment fusing the CMV promoter with POWV-DTV C-encoding sequences (bolded in primer RU-O-26690). Using as template DTVpl (Kenney, J. L., et al., (2018) Vector Borne Zoonotic Dis 18, 371-381), kindly provided by Aaron Brault and based on the Spooner strain of DTV, a fragment overlapping with the CMV promoter—DTV C fusion to the region just downstream of a SacII site within DTV genome was generated by PCR using oligos RU-O-26689

(SEQ ID NO: 245)
(5′-GTTTGTACAAAAAAGCAGGCTATGGTGACTACTTCTAAAGGAAA
G-3′)
and
RU-O-26711
(SEQ ID NO: 246)
(5′-GTTTCCCCATCCTCTATCGCTCTG-3′),

with bolded nucleotides indicating synonymous mutations introduced to ablate the SacII site. DNA was amplified using DTVpl as template and oligos RU-O-26710 (5′-CAGAGCGATAGAGGATGGGGAAAC-3′; (SEQ ID NO: 247) bolded nucleotides indicate synonymous mutations) and RU-O-26688 (5′-TTCGAACCGCGGCTGGGTCCTATTATGCTCCGACTCCCATTGTCATCATC-3′) (SEQ ID NO: 248) to generate a fragment overlapping the killed SacII site to the end of the envelope protein-coding region followed by a SacII site. The three DNA fragments were annealed, extended, and then PCR-amplified using primers RU-O-24611 and RU-O-26688. The resulting DNA fragment was digested with SnaBI and SacII and cloned into similarly digested pZIKV—HPF-CprME to generate pPOWV-DTV-CprME.

[0304] KFDV: synthetic DNA with the CprME-flanked sequence of Kyasanur fever disease virus, strain W-377 (GenBank JF416960.1), was amplified with primers DFRp1532 and DFRp1533 before cloning at the NotI and PacI sites of plasmid pPOWV-LB-CprME (see above), resulting in pKFDV-W-377-CprME.

[0305] LGTV: the CprME of Langat virus, isolate TP21-636, was amplified from a plasmid kindly provided by Dr. Sonja Best (Rocky Mountain Laboratories of NIH/NIAID) with primers DFRp1563 (5-GGAATTCGCGGCCGCCTCAGGATGGCCGGGAAGGCCGTTCTA) (SEQ ID NO: 249) and DFRp1566 (5-CCGCGGCTCGAGTTAATTAACTATTAGGCTCCAACCCCCAGAGTCAT) (SEQ ID NO: 250) before cloning at the NotI and PacI sites of plasmid pPOWV-LB-CprME, resulting in pLGTV-TP21-636-CprME. Two nucleotide mutations from GenBankNC_003690 (A590G and A1893C).

[0306] LIV: synthetic DNA with the CprME-flanked sequence of louping ill virus, isolate LI3/1 (GenBank KP144331), was amplified with primers DFRp1532 and DFRp1533 before cloning at the NotI and PacI sites of plasmid pPOWV-LB-CprME, resulting in pLIV-LI3/1-CprME.

[0307] OHFV: synthetic DNA with the CprME-flanked sequence of Omsk hemorrhagic fever virus, strain Bogoluvovska (GenBank NC_005062), was amplified with primers DFRp1532 and DFRp1533 before cloning at the NotI and PacI sites of plasmid pPOWV-LB-CprME, resulting in pOHFV-CprME.

[0308] To confirm the absence of PCR-induced errors, all PCR-derived regions were sequenced in the final plasmids.

[0309] RVP Production

[0310] RVPs were produced by co-transfecting 1 μg of pWNVII-Rep-REN-IB plasmid with 3 μg of the flavivirus CprME plasmid of choice into the permissive cell line Lenti-X 293T, using Lipofectamine 2000 (Invitrogen, 1166803) according to the manufacturer's instructions. Cells were seeded 24 hours previously at 1×10⁶ cells/well in collagen-coated 6-well plates. Following transfection and 6 hours incubation at 37° C., excess DNA-lipid complexes were removed by aspiration, and the media was replaced with DMEM (Gibco) containing 20 mM HEPES and 10% FBS. For the next 72 hours, in 24-hour intervals, RVP-containing supernatants were harvested, filtered through a 0.45 micron filter and frozen at −80° C., and media replaced with DMEM containing 20 mM HEPES and 10% FBS. Frozen RVPs were later thawed and titrated on Huh-7.5 cells to determine the dilution of RVPs at which cells express 1×10⁶ RLU in the absence of sera or antibody.

[0311] RVP Neutralization Assays

[0312] 96-well plates were seeded with 7,500 Huh-7.5 cells/well in 50 μL of DMEM (Gibco) supplemented with 10% FBS and 1% non-essential amino acids (NEAA). After 24 hours, 100 μL of diluted RVPs were combined with 100 μL of diluted sera or antibody, incubated for 1 hour at 37° C., and then 50 μL of the mix was added in triplicate to the plated cells. RVPs are diluted appropriately in BA-1 diluent (Medium 199 (Lonza) supplemented with 1% BSA and 100 units/mL Penicillin/Streptomycin) to achieve the desired RLU expression. After an additional 24 hours of incubation at 37° C., media was aspirated off the cells, replaced with 35 μL of lysis buffer (Promega, E2810), and the plates were frozen at −80° C. 15 μL of the subsequently thawed lysis buffer was used for Renilla luciferase expression measurement, using the Renilla Luciferase Assay System (Promega, E2810). Sera were either diluted to 1:600,000 final concentration for TBEV RVP neutralization screening or serially diluted to generate curves. Recombinant monoclonal antibodies were used at 10 g/mL final concentration and serially diluted 1:3 for neutralization assays. The half-maximal neutralization titer (NT₅₀) and the half-maximal inhibitory concentration (IC₅₀) were determined by non-linear regression analysis using Prism software (GraphPad). In the cross-neutralization screening against the panel of flavivirus RVPs, recombinant antibodies were assayed at 1 μg/mL final concentration using the protocol described above, and the results compared to no antibody control. In experiments using antibody fragments, equimolar concentrations of antibody fragments and immunoglobins were used. In RVP experiments using antibody combinations, T036 was used at 1 g/mL, and 4G2 (clone D1-4G2-4-15; Sigma cat. MAB10216) at 10 μg/mL final concentration.

[0313] ELISA Assays

[0314] Binding of serum IgG or recombinant IgG antibodies to EDIII proteins was measured by standard ELISA. High-binding 96 well plates (Costar, 07-200-721) were coated overnight with 250 ng of the EDIII protein in PBS per well at room temperature; plates were then blocked with 0.1 mM EDTA, 0.05% Tween, and 2% BSA in PBS for 2 hours at room temperature. Samples were diluted in PBS-T, added to plates, and incubated for an additional 1 hour at room temperature. Secondary goat anti-human-IgG F(ab′)2 fragments conjugated to HRP (Jackson Immunoresearch, 109-036-088) were diluted 1:5,000 in PBS-T, added to the plates, and incubated again for 1 hour at room temperature. Between each step, the plates were washed with PBS-T four times. Plates were finally developed using TMB substrate (ThermoScientific, 34021); the reaction was stopped using 1M sulfuric acid, and the plates were read at 450 nm. Sera were screened for binding at 1:500 dilution. Recombinant monoclonal antibodies were diluted to 10 g/mL and serially diluted 1:3; the half effective concentration (EC₅₀) was determined by non-linear regression analysis using Prism 8 (GraphPad). For cross-binding assays, recombinant antibodies were assayed at 1 g/mL according to the protocol described above using the panel of flavivirus EDIII proteins. The anti-HIV monoclonal antibody 10-1074 was used as isotype control (Mouquet, H., et al., (2012) Proc Natl Acad Sci USA 109, E3268-3277). Antibodies with optical density>2.5 times isotype control signal were considered cross-reactive. The TBEV clinical tests (Tables 1A and 1B) were conducted using the EIA TBE Virus IgG (TBG096) and EIA TBE Virus IgM (TBM096) kits from TestLine Clinical Diagnostics.

[0315] Viruses and Cells

[0316] The low-passage TBEV strain Hypr was provided by the Collection of Arboviruses, Institute of Parasitology, Biology Centre of the Czech Academy of Sciences, Ceske Budejovice, Czech Republic (http://www.arboviruscollection.cz/index.php?lang=en). The virus was originally isolated from the blood of a diseased 10-year-old child in Brno, Czech Republic (former Czechoslovakia), in 1953. The low-passage TBEV strain Neudoerfl was kindly provided by Professor F. X. Heinz, Medical University in Vienna, Austria. The virus was originally isolated from the tick Ixodes ricinus in Austria in 1971. Prior to their use in in vitro experiments, virus strains were propagated in suckling mouse brains and/or BHK-21 cells.

[0317] PS cells (porcine kidney stable) (Kozuch, O. and Mayer, V., (1975) Acta Virol 19, 498) were cultured at 37° C. in Leibovitz (L-15) medium supplemented with 3% fetal bovine serum, 100 U/mL penicillin, 100 μg/mL streptomycin, and 1% L-glutamine (Sigma-Aldrich, Prague, Czech Republic).

[0318] Plaque Assay

[0319] To determine virus titer in cell culture supernatants, plaque assays were performed as previously described (De Madrid, A. T., and Porterfield, J. S. (1969) Bull World Health Organ 40, 113-121) with slight modifications (Formanova, P. P., et al., (2019) J Neuroinflammation 16, 205). Briefly, 10-fold dilutions of virus plus a suspension of PS cells (1.3×10⁵ cells per well) were added to 24-well tissue culture plates. After 4 hours of incubation at 37° C. with 0.5% CO₂, each well was overlaid with carboxymethylcellulose (1.5% in L-15 medium). After a 5-day incubation at 37° C. and 0.5% CO₂, the cell monolayers were visualized using naphthalene black. Viral titers were expressed as plaque-forming units (pfu) per milliliter.

[0320] Virus Neutralization Test (VNT)

[0321] VNT was performed as described previously (Sirmarovi, J., et al., (2014) Ticks Tick Borne Dis 5, 523-527) with several modifications. Briefly, monoclonal antibodies (T025, T028, T034, and T038) were diluted to 2.5 μg/ml in L-15 medium and then serially diluted 1:2 in 96-well plates. Diluted monoclonals were incubated with 50 pfu per well of TBEV-Hypr (sufficient to cause 90-95% cytolysis) for 90 min at 37° C. Thereafter, 5×10⁴ PS cells were added per well. After 4 days incubation at 37° C., the cytopathic effect (CPE) was monitored microscopically, and cell viability was measured using the Cell Counting Kit-8 (Dojindo Molecular Technologies, Inc., Munich, Germany) according to the manufacturer's instructions. Half-maximal inhibitory concentration (IC₅₀) was calculated from two independent experiments done in octuplicates using GraphPad Prism (version 7.04, GraphPad Software, San Diego, CA, USA).

[0322] Effect of Antibodies on Virus Growth

[0323] Monoclonal antibodies (T036, T038, and 10-1074) were diluted to 0.5 or 0.05 μg/ml in L-15 medium and incubated with TBEV-Hypr (50 pfu/well) or TBEV-Neudoerfl (500 pfu/well or 2,500 pfu/well) in 96-well plates for 90 min at 37° C. After incubation, 5×10⁴ PS cells were added per well. After 24 and 48 hours of incubation at 37° C. and 0.5% CO₂, culture media were harvested, and virus titer was determined by plaque assay as described above, and the cell monolayers were fixed with cold acetone-methanol (1:1), blocked with 10% fetal bovine serum, and incubated with mouse anti-flavivirus antibody (1:250 dilution, clone D1-4G2-4-15; Sigma cat. MAB10216), as described previously (Stefanik, M., et al., (2020) Microorganisms 8). After washing, the cells were labeled with secondary goat anti-mouse antibody conjugated to fluorescein isothiocyanate (FITC; diluted 1:500, Sigma cat. AP181F) and counterstained with 4′,6-diamidino-2-phenylindole (DAPI, diluted to 1 μg/mL) to visualize cell nuclei. The fluorescence signal was recorded with an Olympus IX71 epifluorescence microscope and processed by ImageJ software.

[0324] Virus-Cell Binding Assay

[0325] TBEV (strain Hypr; 100 PFU) was pre-incubated with monoclonal antibodies or antibodies in combination (T036 and 10-1074 were used at 0.5 μg/ml, and D1-4G2-4-15 [4G2] was used at 10 μg/ml final concentration) in L-15 medium supplemented with 3% fetal bovine serum, 100 U/mL penicillin, 100 μg/mL streptomycin, and 1% L-glutamine (Sigma-Aldrich, Prague, Czech Republic) for 1.5 hours at 37° C. TBEV-antibody complexes were then added to pre-chilled confluent PS cell monolayers in 6-well plates (1 mL per well). After 1 hour at 4° C., the inoculum was removed, and cells were washed three times with PBS to remove unbound virus. L-15 medium supplemented with 3% fetal bovine serum, 100 U/mL penicillin, 100 μg/mL streptomycin, and 1% L-glutamine and 1.5% of CMC was added (4.5 ml per well), and the temperature was shifted to 37° C. to allow infection of the cells. After 5 days of incubation at 37° C. and 0.5% CO₂, the cell monolayers were stained using naphthalene black, and the plaques were visualized and counted to determine the number of viral particles that bound to the cells during the incubation step.

[0326] Statistical Analyses

[0327] For all live virus experiments, ANOVA followed by Tukey's multiple comparison tests and Student's t-tests were performed with log-transformed data. GraphPad Prism (version 7.04, GraphPad Software, San Diego, CA, USA) was used for analysis. Otherwise, data were analyzed using Mann-Whitney tests or ANOVA and Tukey's multiple comparison tests as specified, and comparison of survival curves was analyzed by Log-rank (Mantel-Cox) test, calculated in GraphPad Prism (version 8.4.3, GraphPad Software, San Diego, CA, USA). p values<0.05 were considered significant.

[0328] Crystallization, Structure Determination, and Refinement

[0329] Complexes for crystallization were produced by mixing Fab and antigen at a 1:1 molar ratio and incubating at room temperature for 1-2 hours. Crystals of T025 Fab-TBEV-WE EDIII-His-Avitag complex (space group P2₁; a=55.5 Å, b=66.7 Å, c=91.2 Å, α=90°, β=94.6°, γ=90°; one molecule per asymmetric unit) were obtained by combining 0.2 μL of crystallization complex with 0.2 μL of 0.1M sodium citrate tribasic dihydrate pH 5.0, 10% PEG 6000 in sitting drops at 22° C. Crystals of T025 Fab-TBEV-FE EDIII-His-Avitag complex (space group P2₁2₁2; a=56.96 Å, b=69.72 Å, c=180.20 Å, α=90°, β=90°, γ=90°; one molecule per asymmetric unit) were obtained by combining 0.2 μL of crystallization complex with 0.2 μL of 0.1M sodium citrate tribasic dihydrate pH 5.0, 10% PEG 6000 in sitting drops at 22° C. Crystals of T025 Fab-TBEV-Si EDIII complex (space group P2₁; a=55.4 Å, b=67.2 Å, c=91.2 Å, α=90°, β=94.8°, γ=90°; one molecule per asymmetric unit) were obtained by combining 0.2 μL of crystallization complex with 0.2 μL of 5% (+/−)-2-Methyl-2,4-pentanediol, 0.1M HEPES pH 7.5, 10% PEG 10,000 in sitting drops at 22° C. Crystals were cryoprotected with 25% glycerol. Crystals of T036 Fab-LIV EDIII complex (space group P1; a=67.0 Å, b=67.9 Å, c=82.4 Å, α=88.0°, β=73.2°, γ=70.6°; two molecules per asymmetric unit) were obtained by combining 0.2 μL of crystallization complex with 0.2 μL of 0.15M Lithium Sulfate monohydrate, 0.1M Citric acid pH 3.5, 18% PEG 6,000 in sitting drops at 22° C. Crystals were cryoprotected stepwise to 25% glycerol before being cryopreserved in liquid nitrogen.

[0330] X-ray diffraction data (Table 6) were collected at Stanford Synchrotron Radiation Lightsource (SSRL) beamline 12-2 using a Dectris Pilatus 6M detector. The data were integrated using Mosfim (Battye, T. G., et al., (2011) Acta Crystallogr D Biol Crystallogr 67, 271-281) and scaled using CCP4 (Winn, M. D., et al., (2011) Acta Crystallogr D Biol Crystallogr 67, 235-242). Four 1800 datasets from the same crystal were collected using different detector distances for the T036-LIV crystals and then merged and scaled using CCP4. The T025-TBEV-WE EDIII complex structure was solved by molecular replacement using the V_{H}V_{L} domains from PDB 2GHW, the C_{H}C_{L} domains from PDB 4OGX, and TBEV EDIII from PDB 6J5F as search models in PHASER (McCoy, A., et al., (2007) J Appl Crystallogr 40, 658-674). The model was refined to 2.24 Å resolution using an iterative approach involving refinement in Phenix (Adams, P. D., et al., (2010) Acta Crystallogr D Biol Crystallogr 66, 213-221) and manual rebuilding into a simulated annealed composite omit map using Coot (Emsley, P., and Cowtan, K., (2004) Acta Crystallogr D Biol Crystallogr 60, 2126-2132). Residues that were disordered and not included in the model were HC residues 214-219 and the 6× His tag (SEQ ID NO: 6668); residue 214 of the LC; and residues 299-302, 397, and the 6× His-tag (SEQ ID NO: 6668) and Avi-tag of the TBEV-WE EDIII domain. The T025-TBEV-FE EDIII and T025-TBEV-Si EDIII complex structures were solved similarly using the partially-refined T025-TBEV-WE EDIII structure as the molecular replacement model. The T025-TBEV-FE EDIII model was refined to 2.35 Å resolution, and the T025-TBEV-Si EDIII model was refined to 1.86 Å resolution using the iterative approach described for T025-TBEV-WE EDIII. The T036-LIV EDIII complex structure was solved by molecular replacement using the V_{H}V_{L} domains from PDB 40B5, the C_{H}C_{L} domains from the partially-refined T025-TBEV-WE EDIII structure, and TBEV EDIII from PDB 6J5F as search models in PHASER (McCoy, A., et al., (2007) J Appl Crystallogr 40, 658-674). The model was refined to 2.4 Å using an iterative strategy as described above that included non-crystallographic symmetry restraints during the initial stages of refinement. Residues that were disordered and not included in the model were HC residues 128-133, 188-190 (chain A), 214-219, and the 6× His tag (SEQ ID NO: 6668); residues 212-214 (chain L) or 213-214 (chain B) of the LC; and residues 301 and 397 (chain C) of the LIV EDIII domain. In addition, there was extra density present in a simulated annealed omit map (Phenix) near residues E98_{HC} and S94_{LC} in both copies of the Fab in the asymmetric unit that were not modeled. The Kabat numbering scheme was used for Fab numbering. Structures were superimposed, RMSDs were calculated, and figures were generated using PyMOL. Buried surface areas and hydrogen bonds were determined using PDBePISA (Krissinel, E., and Henrick, K., (2007) J Mol Biol 372, 774-797). Fab-antigen contact residues were identified as residues in which any atom is within 4 Å of an atom on the other protein. The distance and geometry criteria used for assigning hydrogen bonds were a distance of <4.0 Å and a hydrogen bond angle of 90-270°. The maximum distance allowed for a van der Waals interaction was 4.0 Å.

[0331] Animal Ethics Statement

[0332] The research complied with all relevant European Union guidelines for work with animals and was in accordance with Czech national law guidelines on the use of experimental animals and protection of animals against cruelty (Animal Welfare Act No. 246/1992 Coll.). The protocol was approved by the Committee on the Ethics of Animal Experimentation of the Institute of Parasitology and of the Departmental Expert Committee for the Approval of Projects of Experiments on Animals of the Czech Academy of Sciences (permit No. 4253/2019).

[0333] Mice and Virus Inoculation

[0334] Specific pathogen-free BALB/c mice were obtained from ENVIGO RMS B.V. (Horst, the Netherlands). Sterilized pellet diet and water were supplied ad libitum. In all experiments, female mice aged 6-8 weeks were used. Mice were housed in individually ventilated plastic cages (Techniplast) with wood-chip bedding, with a constant temperature of 22° C., a relative humidity of 65%, and under a 12 hr light/dark cycle. Three mice per group were used in experiments. Mice were inoculated intraperitoneally one day prior to or one day post infection with monoclonal antibodies T025 or 10-1074 in 200 ul PBS, and infected subcutaneously with 100 pfu of TBEV-Hypr (propagated 8 times in suckling mouse brains). Mice were monitored for symptoms and survival over time and euthanized when reaching a humane endpoint.

### Example 2

[0335] Serological Responses in a TBEV-Infected Cohort

[0336] Sera from 141 individuals hospitalized with TBE during the 2011 and 2018 outbreaks in the Czech Republic were analyzed. Samples were obtained at the time of hospitalization, during the encephalitic phase of disease (FIG. 1A) (Holzmann, H., (2003) Vaccine 21, S36-S40). In agreement with previous reports (Bogovič, P., et al., (2018) Travel Med Infect Dis 26, 25-31; Bogovic, P., and Strle, F., (2015) World J Clin Cases 3 430-441), the cohort was characterized by higher incidence in males (61.1%) and older individuals (mean age=49 years; Tables 1A and 1). Control sera were also obtained from 168 randomly selected blood bank donors and from 10 individuals vaccinated against TBEV (Tables 1A and 1). All sera were screened by ELISA at a dilution of 1:500 for the presence of IgG antibodies binding to the EDIII of TBEV (FIG. 1). The signal in infected individuals was significantly higher than in the vaccinated and blood donor groups (p=0.0159 and p<0.0001 by ANOVA using Tukey's correction, respectively; FIG. 1). There was no correlation between TBEV EDIII ELISA reactivity and age or duration of hospitalization (FIG. 2A-O).

[0337] To evaluate serum neutralizing activity, samples obtained from recovered and vaccinated individuals were screened at a 1:6×10⁵ dilution for neutralization using luciferase-expressing TBEV reporter virus particles (RVPs; see Methods) (Pierson, T. C., et al., (2006) Virology 346 53-65). Neutralizing activity ranged from complete to undetectable, was significantly lower in vaccinees (p<0.0001; FIG. 1C) and correlated with EDIII binding in ELISA (p=0.0004; FIG. 2M). The half-maximal neutralizing titers (NT₅₀) for the top 28 infected individuals varied from 0.37-6.7×10⁶ (FIGS. 1D-E). In contrast, vaccinees showed NT₅₀s of 0.32-1.0×10⁴ (FIGS. 2N-0). It was concluded that individuals hospitalized for TBEV infection show a broad distribution of EDIII binding and neutralizing activity that is generally higher than the vaccinees in this cohort.

[0338] B Cell Memory Converges on Specific Antibody Genes

[0339] To characterize the anti-TBEV antibodies, TBEV-specific B cells from peripheral blood of six infected individuals (orange in FIGS. 1D and 1E) and 3 vaccinees were purified (FIGS. 3A-D and 4A). The frequency of TBEV EDIII-specific B cells among circulating CD20⁺ B cells was higher in the infected group (0.067-0.31%) compared to vaccinees (1.28-5.95×10⁻³%). In total, 776 IgG antibody heavy and light chain gene pairs were amplified by RT-PCR and sequenced (EXAMPLE 1, FIGS. 3B and 5D, and Tables 2A-2J). The average somatic hypermutation in IGVH and IGVL was 18 and 9 nucleotides, respectively, CDR3 length was normal (mean CDRH3 length of 13.5 and mean CDRL3 length of 9.4), and hydrophobicity was slightly increased compared to control (p<0.0001; FIGS. 4B-D) (Briney, B., et al., (2019) Nature 566, 393-397; Rock, E. P., et al., (1994) J Exp Med 179, 323-328). As with other viral pathogens including HIV-1, Zika, hepatitis B, and SARS-CoV-2 (Robbiani, D. F., et al., (2017) Cell 169, 597-609 e511; Robbiani, D. F., et al., (2020) Nature 584, 437-442; Scheid, J. F., et al., (2011) Science (New York, NY) 333, 1633-1637; Wang, Q., et al., (2020) Cell Host Microbe 28, 335-349.e336; West, A. P., et al., (2012) Proc Natl Acad Sci USA 109, E2083-20990), many of the sequences were found in expanded B cell clones (37.9%, FIGS. 3B and D).

[0340] Sequence analysis revealed antibodies with similar features within and between individuals (FIGS. 3B, 3D and 3E, Tables 2A-2J and 3). For example, VH1-69 and VH3-48 accounted for 59.2% and 7.5% of all clonal sequences, respectively (shades of blue and red in FIGS. 3B and 3D). In addition, related sequences containing these VH genes were found in multiple donors (purple lines in FIG. 3E). Usage of VH1-69, VK2-28, VK1-33, and V_{L}4-69 genes in infected donors was significantly over-represented (p<0.01); VH3-48, VK1-5, and V_{L}2-14 genes were also enriched, although not significantly (FIGS. 4E-G). In some cases, including clonally expanded IGVH1-69/IGVK2-28 and IGVH3-48/IGVK1-5 antibodies, sequence similarities between individual donors extended to the IGH and IGL CDR3s (Table 3, FIGS. 4H and 4I). It was concluded that the memory B cell response to the TBEV EDIII converges towards specific antibody genes.

[0341] Potent and Broadly Cross-Reactive Anti-TBEV Antibodies

[0342] Fifty-nine antibodies (46 from convalescent and 13 from vaccinated donors, Table 4) were cloned, modified through recombinant DNA methods, expressed, and tested in ELISA for binding to EDIII proteins corresponding to all 3 TBEV subtypes: Western European (TBEV^{WE}), Far Eastern (TBEV^{FE}), and Siberian (TBEV^{Si}; FIGS. 5A and 6A, and Table 5). All but one of the 59 antibodies bound to all 3 EDIIIs with similar half-maximal effective concentrations (EC₅₀) ranging from 0.2 to 12 ng/mL (FIG. 5B, Table 5).

[0343] When tested for neutralizing activity against TBEV RVPs, 43 out of 46 antibodies obtained from infected donors neutralized, with IC₅₀s as low as 0.02 ng/mL (FIGS. 5C and 5D, Table 5). In contrast, the best antibody obtained from vaccinated donors had an IC₅₀ of 8.3 ng/mL. Seven antibodies, all isolated from infected donors, were potent neutralizers of TBEV with IC₅₀s below 1 ng/mL (FIG. 5D). Four of these antibodies were also evaluated for neutralization of authentic TBEV (FIGS. 5E and 5F). All four antibodies showed potent activity with IC₅₀s ranging from 35.9 to 268.8 ng/mL (Table 5).

[0344] To determine whether the TBEV antibodies cross-react with related viruses, the TBEV antibodies were screened them at a single concentration (1 μg/mL) for binding to the EDIIIs of Langat (LGTV), louping ill (LIV), Omsk hemorrhagic fever (OHFV), Kyasanur forest disease (KFDV), and Powassan lineage I and II viruses (POWV-DTV and POWV-LB; see Methods and FIGS. 6B and 6C). Broad cross-reactivity was observed for many of the antibodies tested (FIG. 6B). To determine whether the antibodies are also broadly neutralizing, the antibodies were screened against RVPs corresponding to the same panel of tick-borne viruses. When tested at a concentration of 1 μg/ml most of the IGHV1-69 antibodies neutralized LGTV, LIV, POWV-LB, and POWV-DTV and one of the IGVH3-48/IGVK1-5 antibodies neutralized all RVPs except POWV-LB (FIGS. 6B and 6C). IC₅₀s against the flavivirus RVP panel were in the single digit ng/mL range for several of the cross-reactive antibodies (FIG. 5G and FIGS. 6D-I; Table 5). For example, an IGVH3-48/IGVK1-5 antibody, T056, is a potent neutralizer of LGTV, LIV, and OHFV, with IC₅₀ values equal to or less than 1 ng/mL. It was concluded that some TBEV neutralizing antibodies are broadly active against tick-borne flaviviruses.

[0345] Antibody T036 Promotes TBEV Infection

[0346] In contrast to the other antibodies, T036 displayed dose-dependent enhancement of TBEV and POWV-LB RVP infection (FIG. 7A and FIG. 6D). Enhancement was also observed with T036 F(ab′)2 and F(ab), indicating that neither bivalent binding nor the Fc domain is required for enhancement (FIG. 7A). To determine whether T036 enhances infection of authentic TBEV, plaque reduction assays were performed. Addition of T036 increased virus growth when compared to T038 (a neutralizing antibody) or isotype control (FIGS. 7B and 7C; FIGS. 8A and 8B).

[0347] A5, a mouse monoclonal antibody to envelope domain II (EDII), enhances viral fusion by exposing the fusion loop of the E protein. Its activity can be inhibited by 4G2, a fusion loop-directed mouse monoclonal (Haslwanter, D., et al., (2017) PLoS Pathog 13, e1006643-e1006643. To determine whether enhancement of infection by T036, a human anti-EDIII antibody, can also be inhibited by 4G2, TBEV RVP infection was measured in the presence of T036 or 4G2 alone or the combination (FIG. 7D). Consistent with a role for T036 in exposing a fusion loop epitope, enhancement was inhibited when both antibodies were present, but 4G2 alone had no detectable effect (FIG. 7D). Similar results were obtained using authentic TBEV in virus binding assays (FIG. 7E). The results indicate that T036 enhances TBEV infection by a mechanism that requires exposure of the fusion loop of the E protein.

[0348] Antibody T025 Structure Reveals Binding to a Lateral Ridge Epitope

[0349] To gain insights into the mechanism of neutralization by human anti-TBEV antibodies, crystal structures of the Fab of T025, a broad and potent antibody, in complex with the EDIII domains of all three subtypes of TBEV were solved (FIGS. 9A-D and 10A-B). The structure of the T025 Fab-TBEV^{WE} EDIII complex revealed that the antibody binds near the lateral ridge of EDIII in the proximity of the EDI-EDIII hinge region, making both heavy and light chain contacts to the EDI-EDIII hinge and the BC loop, and light chain contacts to the DE loop of the EDIII (FIG. 9A). The antibody contacts EDIII using CDRH2, CDRH3, CDRL1, and CDRL3, and buries 598 Å² of surface area on the EDIII (333 Å² by the VH and 265 Å² by the V_{L}). T025 inserts Asp100_{HC} and Trp94_{LC} into a cleft in the EDIII, making a salt bridge (Asp100_{HC}-Lys311_{EDIII}) and hydrogen bonds to the EDIII (FIG. 9B). Crystal structures of T025 Fab in complex with TBEV^{FE} EDIII and TBEV^{Si} EDIII were similar to the T025-TBEV^{WE} EDIII structure (RMSDs=0.53 Å for 519 Cα atoms and 0.25 Å for 516 Cα atoms, respectively), consistent with 100% sequence conservation between these three strains of the virus in the epitope residues (FIG. 10A-B).

[0350] The T025 Fab-TBEV^{WE} structure was compared to a 3.9 Å cryo-EM structure of a mouse monoclonal antibody (19/1786) bound to the TBEV virion (Füzik, T., et al., (2018) Nat Commun 9, 436). T025 and 19/1786 are related by <65% amino acid sequence identity in the V_{H}V_{L} and 47% in the CDRs, but structural alignment of the structures by the Cα atoms of the EDIIIs shows that the two antibodies recognize similar epitopes (FIG. 9C) and adopt similar poses (FIG. 9D). The lower resolution cryo-EM structure can therefore be used to deduce details about how T025 binds to and neutralizes the virus. In addition to contacts with EDIII, 19/1786 interacted with either the EDI or EDII of a neighboring subunit (Füzik, T., et al., (2018) Nat Commun 9, 436). This, taken together with the relatively low buried surface area on the EDIII by T025 (˜600 Å² compared with a typical value of ˜1100 Å²) (Ramaraj, T., et al., (2012) Biochim Biophys Acta 1824, 520-532), indicates that T025 also contacts neighboring domains on a native virion. It is also likely that in common with recognition of virions by 19/1786, 120 of the 180 EDIIIs on the virion could be bound by T025.

[0351] Antibody T025 Prevents and Treats Infection in Mice

[0352] To determine whether anti-EDIII antibodies can protect against infection in vivo, prophylaxis experiments were performed in BALB/c mice. The mice received graded doses of T025 (100 to 0.1 μg per mouse) 24 hours before challenge with 10² pfu of TBEV (a lethal dose). All mice treated with the isotype control antibody died by day 10 (n=6). In contrast, even the lowest dose of T025 was protective; all but 1 of the 24 mice receiving the antibody survived (p<0.0001, FIG. 10A). To test the T025's potential for therapy, BALB/c mice were infected with 10² pfu of TBEV and then injected with 30 μg of T025 or isotype control 1, 3 or 5 days later (FIG. 10B). All 12 control mice succumbed to the infection by day 13. In contrast, 12 out of 13 mice treated with T025 on day 1, and 4 out of 13 mice treated on day 3 after infection survived. All mice treated with T025 5 days after infection failed to respond. Thus T025, a broadly neutralizing human anti-TBEV antibody, is efficacious in prevention and treatment of TBEV infection in BALB/c mice.

### DISCUSSION

[0353] Tick-borne flaviviruses can cause fulminant encephalitis for which there is no effective therapy. This group of viruses is a growing public health concern in Europe, Asia, and North America. Among disease-causing tick-borne flaviviruses, TBEV is prevalent in Central Europe and Russia. Although there is a great deal of information on the polyclonal humoral immune response to TBEV (Albinsson, B., et al., (2018) Euro Surveill 23, pii=17-00838; Holzmann, H., (2003) Vaccine 21 S36-S40; Matveeva, V. A., et al., (1995) Immunol 46, 1-4; McAuley, A. J., et al., (2017) NPJ Vaccines 2, 5; Remoli, M. E., et al., (2014) Pathog Dis 73, 1-3), there is little or no understanding of the molecular nature of the neutralizing antibody response induced by natural infection or vaccination. This example describes 776 antibodies obtained from the memory B cells of 6 recovered and 3 vaccinated individuals, among which are several broad and potent neutralizers of tick-borne flaviviruses. The data provide insights into the human antibody response to TBEV and related pathogens, as well as mechanisms of antibody-induced neutralization and enhancement. Finally, broad and potent neutralizing human monoclonal antibodies are highly effective for protection and therapy in vivo and have significant potential for clinical use.

[0354] Human neutralizing antibody responses to pathogens frequently converge on the same IGV genes. Examples include neutralizing antibodies to HIV-1, influenza, Zika, hepatitis B, and SARS-CoV-2 viruses (Robbiani, D. F., et al., (2017) Cell 169, 597-609 e511; Robbiani, D. F., et al., (2020) Nature 584, 437-442; Scheid, J. F., et al., (2011) Science (New York, NY) 333, 1633-1637; Tiller, T., et al., (2007) Immunity 26, 205-213; Wang, Q., et al., (2020) Cell Host Microbe 28 335-349.e336; West, A. P., et al., (2012) Proc Natl Acad Sci USA 109, E2083-2090). Antibodies to the EDIII of TBEV produced by different individuals show strong homology that, like SARS-CoV-2 antibodies, extends beyond IGV heavy and light chain gene pairing and includes the CDR3 regions.

[0355] Among the neutralizing antibodies to TBEV, VH1-69 and VH3-48 were highly over-represented. VH1-69 was paired with a variety of different light chain genes to produce neutralizing antibodies that were found among vaccinees and recovered individuals. This group of antibodies varied broadly in neutralizing activity ranging from IC₅₀ 12-1180 ng/mL (geometric mean 186.2 ng/mL). VH1-69 antibodies are highly represented in the human repertoire and are also common among broadly neutralizing antibodies to influenza, hepatitis C and HIV-1 (Chen, F., et al., (2019) Curr Opin Virol 34, 149-159). Anti-TBEV VH3-48 antibodies differed from VH1-69 in that they were always paired with the same light chain, VK1-5. VH3-48 antibodies were also more potent than VH1-69 with IC₅₀s ranging from 0.5-7.3 ng/mL (geometric mean 2 ng/mL), and they were only found in convalescent individuals. The absence of this class of potent antibodies in the vaccinees examined is consistent with the lower levels of serum neutralizing potency in this group. Finally, VH3-48 antibodies are also potent neutralizers of several related tick-borne flaviviruses, including KFDV, LGTV, LIV, and OHFV, with IC₅₀s 1-36 ng/mL.

[0356] Antibodies to a number of different flaviviruses, including dengue and Zika, can be protective if administered before and even after infection (Robbiani, D. F., et al., (2017) Cell 169 597-609 e511; Xu, M., et al., (2017) NPJ Vaccines 2, 2). In Russia and Kazakhstan, administration of TBEV hyperimmune plasma is recommended for post-exposure prophylaxis for individuals that present within 3 days of a tick bite (2008; Pen'evskaia, N. A., and Rudakov, N. V., (2010) Med Parazitol (Mosk) 53-59). The efficacy of this intervention may vary from batch to batch of donor plasma (Rabel, P. O., et al., (2012) Clin Vaccine Immunol 19 623-625; Ruzek, D., et al., (2019) Antiviral Res 164, 23-51), and its use was discontinued in some countries after a small number of adverse events and concerns about the possibility of antibody-dependent enhancement of disease (Arras, C., et al., (1996) Lancet 347, 1331; Kluger, G., et al., (1995) Lancet 346, 1502; Waldvogel, K., et al., (1996) Eur J Pediatr 155, 775-779). Mouse monoclonal antibodies can also protect against TBEV but have not been tested in the clinic (Baykov, I. K., et al., (2014) Vaccine 32, 3589-3594; Levanov, L. N., et al., (2010) Vaccine 28, 5265-5271; Matveev, A., et al., (2020) Vaccine 38, 4309-4315). The experiments extend previous work by uncovering human monoclonal antibodies that prevent infection in mice even when administered at doses as low as ˜0.005 mg/Kg. Notably, these antibodies also suppress disease in mice even when administered 3 days after infection at a dose of ˜1.5 mg/Kg.

[0357] Sub-optimal antibody levels to other flaviviruses, most importantly dengue and possibly Zika, are associated with antibody-dependent enhancement (ADE) of disease (Dejnirattisai, W., et al., (2016) Nat Immunol 17, 1102-1108; Harrison, S. C., (2016) Nat Immunol 17, 1010-1012; Katzelnick, L. C., et al., (2017) Science (New York, NY) 358, 929-932; Katzelnick, L. C., et al., (2020) Science (New York, NY) 369, 1123-1128; Sabin, A. B., (1950) Bacteriol Rev 14, 225-232; Stettler, K., et al., (2016) Science (New York, NY) 353, 823-826). ADE has also been discussed as an explanation for the fulminant encephalitis that occurs in a fraction of individuals after TBEV infection, including vaccine break-throughs (Ruzek, D., et al., (2019) Antiviral Res 164, 23-51). ADE in dengue infection is thought to be mediated by immune-complexes that enhance pathogen entry into Fc receptor-expressing cells (Halstead, S. B., (2014) Microbiol Spectr 2). However, antibodies can also enhance infection by inducing conformational changes in the viral surface proteins that facilitate engagement of the viral fusion machinery (Guillon, C., et al., (2002) J Virol 76, 2827-2834; Wan, Y., et al., (2020) J Virol 94, e02015-02019; Winarski, K. L., et al., (2019) Proc Natl Acad Sci USA 116, 15194-15199). Indeed, a mouse monoclonal antibody to TBEV has been identified, which enhances by this mechanism (Haslwanter, D., et al., (2017) PLoS Pathog 13, e1006643-e1006643). The discovery that humans infected with TBEV produce antibodies that promote viral infection in vitro raises the question of whether such antibodies may play a role in TBE pathogenesis or the rare adverse events seen after plasma administration in the clinic.

[0358] Current TBEV vaccines were developed over 30 years ago and consist of inactivated virus grown on chick embryo cells. Vaccination is TBEV-specific, requires priming and two boosts, and results in 90-100% seroconversion depending on the vaccine used (Loew-Baselli, A., et al., (2009) Hum Vacc 5, 551-556; Maikova, G. B., et al., (2019) J Med Virol 91, 190-200; Vorovitch, M. F., et al., (2019) Adv Virol 2019, 5323428). Additional boosts are recommended every 3-5 years for the lifetime of the individual. The existence of broad and potent VH3-48 antibodies indicates that next-generation vaccines specifically designed to target the epitope recognized by these antibodies might be universally effective against TBEV, KFDV, LGTV, LIV, and OHFV. Finally, potent human antibodies with broad activity against tick-borne flaviviruses have significant potential for clinical use in individuals that are at high risk and do not respond to the vaccine and for therapy in the early stages of infection.

TABLE 1A

| | Year of | Age at | | Vaccination | | Hospital- | | | IgG | |
|---|---|---|---|---|---|---|---|---|---|---|
| ID | Diagnosis | Diagnosis | Sex | History | Tick Bite | ization (days) | Severity | IgM (IP) | (VIEU/ml) | Notes |
| 1 | 2011 | 56 | female | not known | not known | | mild | 4.4 | 687.15 | |
| 2 | 2011 | 12 | male | not known | not known | | mild | 3.7 | 634.94 | |
| 3 | 2011 | | | | | | | | | |
| 4 | 2011 | 26 | male | not known | not known | | moderate | 3.8 | 905.79 | |
| 5 | 2011 | | | | | | | | | |
| 6 | 2011 | 41 | female | not known | not known | 3 | mild | 4 | 905.79 | |
| 7 | 2011 | 75 | male | not known | yes | 7 | severe | 3.6 | 934.2225 | |
| 8 | 2011 | 65 | male | not known | not known | 10 | severe | 3.5 | 252.54 | diabetes |
| 9 | 2011 | 65 | male | no | yes | | severe | 3.8 | 905.79 | |
| 10 | 2011 | 64 | male | no | yes | 7 | severe | 3.7 | 905.79 | |
| 11 | 2011 | 77 | male | no | yes | 27 | severe | 3.8 | 252.54 | death due to |
| | | | | | | | | | | pulmonary |
| | | | | | | | | | | embolism |
| 12 | 2011 | 10 | male | no | yes | 7 | mild | 2.7 | 934.2225 | |
| 13 | 2011 | 60 | female | no | yes | 16 | severe | 4.3 | 905.79 | |
| 15 | 2011 | | | | | | | | | |
| 16 | 2011 | 66 | female | no | yes | 10 | severe | 2.8 | 388.59 | |
| 17 | 2011 | 42 | female | not known | not known | 24 | severe | 2.3 | 230.7225 | paresis; |
| | | | | | | | | | | longterm |
| | | | | | | | | | | convalescence |
| 18 | 2011 | | | | | | | | | no data |
| | | | | | | | | | | available |
| 19 | 2011 | 54 | male | no | yes | 10 | severe | 5.6 | 563.4924 | |
| 20 | 2011 | | | | | | | | | |
| 21 | 2011 | 49 | female | not known | yes | 8 | moderate | 3.5 | 962.9 | |
| 22 | 2011 | | | | | | | | | |
| 23 | 2011 | 74 | male | not known | yes | 22 | severe | 3 | 740.34 | |
| 24 | 2011 | 66 | male | no | yes | 11 | severe | 3.7 | 342.26 | |
| 25 | 2011 | 34 | male | not known | yes | 8 | moderate | 3.4 | 435.9 | |
| 26 | 2011 | 62 | male | no | yes | 19 | severe | 2.6 | 905.79 | |
| 27 | 2011 | 35 | female | not known | yes | 13 | severe | 3.2 | 252.54 | |
| 28 | 2011 | 44 | male | no | yes | 10 | moderate | 3.3 | 905.79 | |
| 29 | 2011 | 24 | female | no | yes | 12 | severe | 3.7 | 905.79 | recent |
| | | | | | | | | | | travel to |
| | | | | | | | | | | Croatia, |
| | | | | | | | | | | herpes |
| | | | | | | | | | | simplex |
| | | | | | | | | | | reactivation |
| | | | | | | | | | | during TBE |
| 30 | 2011 | 45 | female | no | yes | 13 | severe | 3.4 | 252.54 | |
| 31 | 2011 | 35 | female | not known | yes | 9 | severe | 3.5 | 905.79 | light paresis |
| 32 | 2011 | | | | | | | | | no data |
| | | | | | | | | | | available |
| 33 | 2011 | 69 | male | no | yes | 9 | moderate | 4 | 934.2225 | recent |
| | | | | | | | | | | travel to |
| | | | | | | | | | | Sicily, |
| | | | | | | | | | | metabolic |
| | | | | | | | | | | disorder |
| 34 | 2011 | | | | | | | | | no data |
| | | | | | | | | | | available |
| 35 | 2011 | 24 | female | no | yes | 9 | severe | 3.5 | 905.79 | leptospira |
| | | | | | | | | | | coinfection |
| 36 | 2011 | 44 | male | no | yes | 8 | severe | 3.7 | 905.79 | |
| 37 | 2011 | 32 | female | not known | yes | 8 | mild | 4 | 962.9 | |
| 38 | 2011 | 40 | female | not known | yes | 19 | severe | 3.9 | 962.9 | paresis |
| 39 | 2011 | 35 | female | no | yes | 9 | mild | 3.7 | 962.9 | |
| 40 | 2011 | 56 | female | no | yes | 10 | severe | 2.7 | 209.15 | |
| 41 | 2011 | 15 | male | not known | not known | 0 | mild | 3.7 | 962.9 | discharged |
| | | | | | | | | | | AMA |
| 42 | 2011 | 36 | female | no | yes | 11 | moderate | 3 | 962.9 | |
| 43 | 2011 | | | | | | | | | |
| 44 | 2011 | 67 | female | no | yes | 10 | severe | 3.5 | 905.79 | paresis |
| 45 | 2011 | | | | | | | | | |
| 46 | 2011 | 35 | female | no | yes | 7 | mild | 4.2 | 849.66 | |
| 47 | 2011 | | | | | | | | | |
| 48 | 2011 | | | | | | | | | |
| 49 | 2011 | 42 | female | no | yes | 12 | severe | 3.8 | 905.79 | recent |
| | | | | | | | | | | travel to |
| | | | | | | | | | | Croatia |
| 50 | 2011 | | | | | | | | | |
| 51 | 2011 | 89 | female | not known | not known | 16 | severe | 4 | 849.66 | diabetes |
| | | | | | | | | | | mellitus |
| 52 | 2011 | 73 | male | no | not known | 14 | severe | 3.8 | 634.94 | |
| 53 | 2011 | 26 | male | no | no | 8 | mild | 4.3 | 533.46 | |
| 54 | 2011 | | | | | | | | | |
| 55 | 2011 | 39 | female | no | yes | 10 | moderate | 3.6 | 905.79 | |
| 56 | 2011 | | | | | | | | | |
| 57 | 2011 | 29 | female | no | no | 10 | mild | 3 | 905.79 | psoriasis |
| 58 | 2011 | 55 | female | no | no | 4 | mild | 3.6 | 962.9 | |
| 59 | 2011 | 30 | female | no | yes | 9 | severe | 3.1 | 905.79 | |
| 60 | 2011 | 62 | male | no | yes | 8 | moderate | 3.6 | 905.79 | |
| 61 | 2011 | 49 | male | no | yes | 8 | mild | | | |
| 62 | 2018 | 38 | male | no | yes | 9 | mild | | | |
| 63 | 2018 | 43 | male | no | yes | 7 | mild | | | |
| 64 | 2018 | 55 | male | no | not known | 17 | mild | | | |
| 65 | 2018 | 55 | male | no | yes | 10 | mild | | | |
| 66 | 2018 | 67 | female | no | not known | 13 | severe | | | |
| 67 | 2018 | 54 | male | no | yes | 234 | severe | | | paresis |
| 68 | 2018 | 46 | male | no | not known | 9 | mild | | | |
| 69 | 2018 | 31 | male | no | yes | 9 | mild | | | |
| 70 | 2018 | 45 | female | no | yes | 7 | mild | | | |
| 71 | 2018 | 35 | female | no | yes | | mild | | | |
| 73 | 2018 | 52 | male | no | yes | 15 | severe | | | paresis |
| 74 | 2018 | 11 | male | no | yes | 15 | mild | | | |
| 75 | 2018 | 10 | male | no | yes | 11 | mild | | | |
| 76 | 2018 | 66 | male | no | yes | 7 | moderate | 4.7 | 962.9 | |
| 77 | 2018 | 60 | female | no | yes | 8 | moderate | 5.3 | 962.9 | unknown |
| | | | | | | | | | | neuroinfection |
| | | | | | | | | | | in 1966 |
| 78 | 2018 | 78 | male | no | yes | 29 | severe | 6.2 | 697.7096 | |
| 79 | 2018 | 32 | female | no | no | 9 | moderate | 4.8 | 209.15 | |
| 80 | 2018 | 39 | male | no | yes | 7 | severe | 5.5 | 655.7064 | |
| 81 | 2018 | 68 | male | not known | yes | 13 | severe | 4.5 | 296.91 | |
| 82 | 2018 | 71 | male | not known | yes | 16 | severe | 5.6 | 563.4924 | |
| 83 | 2018 | 45 | male | not known | not known | 9 | moderate | 2.9 | 162.5529 | |
| 84 | 2018 | 32 | male | no | yes | 6 | moderate | 5.1 | 629.7729 | |
| 85 | 2018 | 59 | female | no | yes | 8 | moderate | 3.8 | 158.3756 | |
| 86 | 2018 | 24 | male | no | yes | 10 | moderate | 5.2 | 426.3596 | |
| 87 | 2018 | 50 | male | no | yes | 8 | mild | 5.7 | 609.2025 | probable |
| | | | | | | | | | | ingestion of |
| | | | | | | | | | | unpasteurised |
| | | | | | | | | | | milk |
| | | | | | | | | | | products |
| 88 | 2018 | 34 | male | no | no | 8 | moderate | 5.9 | 708.3084 | |
| 89 | 2018 | 5 | male | no | yes | 6 | mild | 6.4 | 459.9225 | |
| 90 | 2017 | 31 | male | not known | not known | 1 | | 3.5 | 479.3169 | serum taken |
| | | | | | | | | | | in 2018 |
| | | | | | | | | | | during |
| | | | | | | | | | | reoccurrence |
| | | | | | | | | | | of |
| | | | | | | | | | | neuroinfection |
| | | | | | | | | | | symptoms |
| 91 | 2018 | 46 | female | | | | | 2.2 | 911.4569 | some data not |
| | | | | | | | | | | available, |
| | | | | | | | | | | hospitalized |
| | | | | | | | | | | in different |
| | | | | | | | | | | hospital |
| 92 | 2018 | 54 | female | no | not known | 6 | mild | 4.4 | 588.7889 | travel to |
| | | | | | | | | | | Croatia 2 |
| | | | | | | | | | | months |
| | | | | | | | | | | previously |
| 93 | 2018 | 66 | male | no | yes | | severe | 3.8 | 22.1784 | death due to |
| | | | | | | | | | | TBE |
| 94 | 2018 | 84 | male | no | yes | | severe | 5.6 | 25.637649 | death due to |
| | | | | | | | | | | TBE |
| 95 | 2018 | 71 | female | no | yes | 14 | moderate | 5.9 | 513.6344 | |
| 96 | 2018 | 65 | male | no | yes | 13 | severe | 5.7 | 609.2025 | |
| 97 | 2018 | 47 | male | no | yes | 11 | moderate | 6.3 | 274.6025 | |
| 98 | 2018 | 73 | male | no | yes | 11 | severe | 5.4 | 660.9225 | |
| 99 | 2018 | 40 | male | no | no | 11 | severe | 7.2 | 256.9329 | immunodeficient, |
| | | | | | | | | | | probable |
| | | | | | | | | | | ingestion of |
| | | | | | | | | | | unpasteurised |
| | | | | | | | | | | milk products |
| | | | | | | | | | | (goat) |
| 100 | 2018 | 44 | male | no | yes | 7 | moderate | 6.1 | 756.4881 | |
| 101 | 2018 | 35 | male | no | not known | 9 | severe | | 342.26 | |
| 102 | 2018 | 66 | female | no | yes | 17 | moderate | 5.9 | 573.5816 | atrial |
| | | | | | | | | | | fibrillation |
| | | | | | | | | | | during |
| | | | | | | | | | | hospitalization |
| | | | | | | | | | | for TBE |
| 104 | 2018 | 18 | male | yes | yes | 8 | severe | 6.6 | 962.9 | |
| 105 | 2018 | 32 | female | not known | not known | 0 | mild | 5.9 | 650.5001 | discharged |
| | | | | | | | | | | AMA |
| 106 | 2018 | 47 | male | no | no | 8 | moderate | 5.7 | 158.3756 | |
| 107 | 2018 | 6 | male | no | yes | 9 | mild | 5.9 | 614.3304 | |
| 108 | 2018 | 47 | male | no | yes | 5 | severe | 4.8 | 697.7096 | discharged |
| | | | | | | | | | | AMA |
| 109 | 2018 | 53 | female | no | yes | 10 | moderate | 4.8 | 484.19 | |
| 110 | 2018 | 70 | male | no | yes | 0 | mild | 5.3 | 402.6801 | |
| 111 | 2018 | 39 | male | no | yes | 8 | severe | 5.6 | 604.0844 | |
| 112 | 2018 | 63 | female | not known | not known | 9 | moderate | 5.7 | 729.6236 | |
| 113 | 2018 | 46 | male | not known | yes | 6 | mild | 6.9 | 538.4409 | |
| 114 | 2018 | 41 | male | not known | yes | 1 | mild | 5.4 | 634.94 | discharged |
| | | | | | | | | | | AMA |
| 115 | 2018 | 5 | male | no | yes | 6 | mild | 7.1 | 849.66 | |
| 116 | 2018 | 74 | male | no | yes | 8 | moderate | 5.1 | 573.5816 | |
| 117 | 2018 | 52 | male | no | yes | 17 | severe | 6.5 | 431.1249 | |
| 118 | 2018 | 9 | male | no | yes | 6 | mild | 5.9 | 939.9384 | |
| 119 | 2018 | 63 | female | not known | not known | 12 | severe | 3.1 | 388.59 | |
| 120 | 2018 | 51 | female | no | no | 11 | severe | 4.8 | 166.74 | |
| 121 | 2018 | 73 | female | no | yes | 16 | severe | 2.5 | 248.1569 | |
| 123 | 2018 | 45 | male | not known | no | 9 | severe | 6.8 | 187.8225 | |
| 124 | 2018 | 54 | male | no | yes | 8 | severe | 6.7 | 369.9404 | |
| 125 | 2018 | 42 | male | no | no | 7 | moderate | 6.9 | 310.4121 | |
| 126 | 2018 | 58 | male | no | yes | 12 | severe | 6.4 | 235.0664 | |
| 127 | 2018 | 71 | male | no | yes | 9 | moderate | 5.7 | 416.8584 | |
| 128 | 2018 | 50 | male | yes | no | 7 | moderate | 6 | 265.7481 | |
| 129 | 2018 | 76 | male | not known | not known | 11 | severe | 4.5 | 226.3884 | |
| 130 | 2018 | 72 | female | no | yes | 11 | moderate | 5.8 | 455.0984 | |
| 131 | 2018 | 78 | female | no | yes | 14 | severe | 5.5 | 346.8489 | |
| 132 | 2018 | 32 | male | no | yes | 7 | moderate | 5.9 | 469.6001 | |
| 133 | 2018 | 28 | male | no | no | 6 | severe | 6.1 | 416.8584 | |
| 134 | 2018 | 85 | female | not known | yes | 9 | severe | 4.1 | 121.2209 | |
| 135 | 2018 | 68 | female | not known | not known | 9 | severe | 5.6 | 548.4321 | |
| 136 | 2018 | 58 | female | no | yes | 9 | severe | 6 | 479.3169 | |
| 137 | 2018 | 47 | female | no | not known | 8 | severe | 3.4 | 383.9129 | |
| 138 | 2018 | 58 | female | no | yes | 8 | severe | 3.9 | 196.3241 | |
| 139 | 2018 | 49 | male | no | no | 7 | moderate | 5.4 | 265.7481 | |
| 140 | 2018 | 51 | male | no | yes | 11 | severe | 4.2 | 204.8649 | |
| 141 | 2018 | 84 | female | no | no | 12 | severe | 6.1 | 256.9329 | |
| 142 | 2018 | 64 | male | no | yes | 8 | moderate | 3.9 | 435.9 | |
| 143 | 2018 | 58 | male | no | no | 15 | severe | 4.7 | 292.4289 | infected |
| | | | | | | | | | | travelling in |
| | | | | | | | | | | Czech |
| | | | | | | | | | | Republic |
| 144 | 2018 | 65 | male | yes | yes | 4 | mild | 2.4 | 337.6809 | |
| 145 | 2018 | 66 | female | no | yes | 9 | severe | 4.5 | 479.3169 | |

Cells left blank where information is unknown or unavailable.
AMA: against medical advice
IgM: measured using EIA TBE Virus IgM kit (TestLine Clinical Diagnostics, TBM096); negative < 0.9 (IP); borderline result 0.9 to 1.1; 1.1 < positive
IgG: manufacturers recommendation; measured using EIA TBE Virus IgG kit (TestLine Clinical Diagnostics, TBG096); negative < 76.89 VIE/ml; borderline result 76.89 to 92.87; 92.87 < positive

TABLE 1B

| | Year of | | | Number of TBEV | |
|---|---|---|---|---|---|
| | Sample | | | Vaccination | Date of |
| ID | Collection | Age | Sex | Doses | Last Dose |
| V3 | 2018 | 31 | female | not known | not known |
| V4 | 2018 | 64 | female | 3 | 2006 |
| V5 | 2018 | 34 | female | 3 | 2003 |
| V6 | 2018 | 37 | female | not known | 1991 |
| V7 | 2018 | 22 | female | 3 | 2016 |
| V8 | 2018 | 21 | female | not known | 2013 |
| V9 | 2018 | 28 | female | not known | not known |
| V11 | 2019 | 24 | female | 2 | 2017 |
| V12 | 2019 | 29 | female | 7 | 2018 |
| V16 | 2019 | 24 | male | 4 | 2018 |

Lengthy table referenced here
US20240002480A1-20240104-T00001
Please refer to the end of the specification for access instructions.

Lengthy table referenced here
US20240002480A1-20240104-T00002
Please refer to the end of the specification for access instructions.

Lengthy table referenced here
US20240002480A1-20240104-T00003
Please refer to the end of the specification for access instructions.

Lengthy table referenced here
US20240002480A1-20240104-T00004
Please refer to the end of the specification for access instructions.

Lengthy table referenced here
US20240002480A1-20240104-T00005
Please refer to the end of the specification for access instructions.

Lengthy table referenced here
US20240002480A1-20240104-T00006
Please refer to the end of the specification for access instructions.

Lengthy table referenced here
US20240002480A1-20240104-T00007
Please refer to the end of the specification for access instructions.

Lengthy table referenced here
US20240002480A1-20240104-T00008
Please refer to the end of the specification for access instructions.

Lengthy table referenced here
US20240002480A1-20240104-T00009
Please refer to the end of the specification for access instructions.

Lengthy table referenced here
US20240002480A1-20240104-T00010
Please refer to the end of the specification for access instructions.

Lengthy table referenced here
US20240002480A1-20240104-T00011
Please refer to the end of the specification for access instructions.

Lengthy table referenced here
US20240002480A1-20240104-T00012
Please refer to the end of the specification for access instructions.

Lengthy table referenced here
US20240002480A1-20240104-T00013
Please refer to the end of the specification for access instructions.

LENGTHY TABLES
The patent application contains a lengthy table section. A copy of the table is available in electronic form from the USPTO web site (https://seqdata.uspto.gov/?pageRequest=docDetail&DocID=US20240002480A1). An electronic copy of the table will also be available from the USPTO upon request and payment of the fee set forth in 37 CFR 1.19(b)(3).

The application's sequence listing, which the Patent Office published only in electronic form, follows.

SEQUENCE LISTING (6676 sequences)

SEQ ID NO: 1 - protein, 136 aa, Artificial Sequence
  Description of Artificial Sequence: Synthetic polypeptide
EVQLVESGGGLVQPGRSLRLSCTGSGFNFGDYAISWVRQAPGKGLEWVGFIRSKADGGTSQYAASARGRFTISRDDSKSIVYLQMNSLQTEDTAIHYCTRVQMRRADCSGNRCYDVPYFYFYMDVWGMGTTVTVSS

SEQ ID NO: 2 - protein, 107 aa, Artificial Sequence
  Description of Artificial Sequence: Synthetic polypeptide
IRMTQSPSSLSASVGDRVTITCRASQSISNYLNWYQQKPGNAPKLLIYAASSLQSGVPSRFSGSGSGTDFTLTINSLQPEDSATYYCQQSYSTPPLTFGGGTKVEIK

SEQ ID NO: 3 - protein, 120 aa, Artificial Sequence
  Description of Artificial Sequence: Synthetic polypeptide
EVQLVESGGGLVQPGGSLRLSCVASGFTFSGYDMNWIRQAPGKGLEWLSYISNRGDTIYYADSVRGRFTISRDNAKNSLHLQINNLRAEDTAFYYCARERYYDAYNWFDPWGQGTLVTVS

SEQ ID NO: 4 - protein, 108 aa, Artificial Sequence
  Description of Artificial Sequence: Synthetic polypeptide
DIQLTQSPSFLSASVGDRVTITCRASQGISRYLAWYQQKPGKAPKVLIYAASILQSGVPSRFSGSGSGTEFTLTISSLQPEDLATYYCQQLNSSPMYTFGQGTKVEIK

SEQ ID NO: 5 - protein, 118 aa, Artificial Sequence
  Description of Artificial Sequence: Synthetic polypeptide
QVQLVQSGTEVKKPGSSVKVSCRASGGTFSNYAISWVRQAPGQGLKWMGGIIPVWASATYAQIFQGRLTITADESTTTAYMELSSLRSEDTGFYYCAREGGSGSYDYWGQGTLVTVSS

SEQ ID NO: 6 - protein, 112 aa, Artificial Sequence
  Description of Artificial Sequence: Synthetic polypeptide
DIVMTQSPLSLPVTPGEPASISCRSSQSLLHRDGYNYLDWYLQRPGQSPQLLIYLASNRASGVPDRFSGSGSGTDFTLKISRVEAEDVGVYYCMQALRTPRAFGQGTKLEIK

SEQ ID NO: 7 - protein, 118 aa, Artificial Sequence
  Description of Artificial Sequence: Synthetic polypeptide
QVQLVQSGAEVKKPGSSVKVSCKSSGGIFSNFAINWIRQAPGQGLVWMGGIIPAFRTANYAQRVQGRVTITADESTSTVHLEVSALRPEDTAIYYCARVGGLGSYDYWGQGTLVTVSS

SEQ ID NO: 8 - protein, 112 aa, Artificial Sequence
  Description of Artificial Sequence: Synthetic polypeptide
DIVMTQSPLSLSVTLGEPASISCRSSQSLLHRDGNNYLDWYLQKPGRSPQLLIYLGSSRASGVPDRFSGSGSGTDFTLKISRVEAEDIGVYYCMQALQTPHTFGQGTKLEIK

SEQ ID NO: 9 - protein, 118 aa, Artificial Sequence
  Description of Artificial Sequence: Synthetic polypeptide
QVQLVQSGAEVKKPGSSVKVSCKASGGTFSHYAYNWVRQAPGQGLEWMGGIIPVFDTITYAQKFQGRVTITADESTATAHMELSSLRSEDTAVYYCERSGGSSGSDYWGQGTMVTVSS

SEQ ID NO: 10 - protein, 108 aa, Artificial Sequence
  Description of Artificial Sequence: Synthetic polypeptide
DIQLTQSPSSLSASVGDRVTITCQASQDINNYLNWYQKKPGKAPKLLIYDASNLETGVPSRFSGSRSGTDFTFTISSLQPEDIATYYCQQYDNLPRLTFGGGTKVEIK

SEQ ID NO: 11 - protein, 118 aa, Artificial Sequence
  Description of Artificial Sequence: Synthetic polypeptide
QVQLVQSGAEVKKPGSSVKVSCKASGGTFSNFAISWVRQAPGQGLEWMGGIIPLFGTANYAQKFRARVTITADESTNTAYVELSSLRFEDTAVYYCAREDGLGSYDDWGQGTLVTVSS

SEQ ID NO: 12 - protein, 112 aa, Artificial Sequence
  Description of Artificial Sequence: Synthetic polypeptide
DIVMTQSPLSLPVTPGEPASISCRSSQSLLHRNGDNYLDWYLQKPGQSPQLLIYLASNRASGVPDRFSGSGSGTDFTLKISRVEAEDVGVYYCMQALQTPRTFGQGTKLEIK

SEQ ID NO: 13 - protein, 117 aa, Artificial Sequence
  Description of Artificial Sequence: Synthetic polypeptide
QVQLVQSGAEVKKPGSSVKVSCKTSGGTFSNFAINWVRQAPGQGLEWMGGIIPSFGTPNYAQNFQGRVTITADKSTSTAYMELTSLRSDDTAVYFCARRGGWGFDYWGQGTMVTVSS

SEQ ID NO: 14 - protein, 107 aa, Artificial Sequence
  Description of Artificial Sequence: Synthetic polypeptide
DIQLTQSPSSLSVSVGDRVTITCQASQDISNYLNWYQQKPGKAPKLLIYDTSNLETGVPSRFSGSGSGTDFTFTISSLQPEDIATYYCHQYDNLRHTFGGGTKVEIK

SEQ ID NO: 15 - protein, 116 aa, Artificial Sequence
  Description of Artificial Sequence: Synthetic polypeptide
QVQLVQSGAEVKKHGSSVKVSCKASGGTFSNYAINWVRQAPGQGLEWMGKIIPSFGTPHYAQKFQGRLTITADVSTNTGYMELNSLTSEDTAVYYCARGPWGWDHWGQGAMVTVSS

SEQ ID NO: 16 - protein, 107 aa, Artificial Sequence
  Description of Artificial Sequence: Synthetic polypeptide
EIVLTQSPGTLSLSPGERATLSCGASQSVSSDYLAWYQQKPGQAPRLLIYGASGRATGIPDRFSGSGSGTDFTLTISRLQPEDFAVYYCQQYGSSPTFGGGTKVEIK

SEQ ID NO: 17 - protein, 116 aa, Artificial Sequence
  Description of Artificial Sequence: Synthetic polypeptide
QVQLVQSGAEVKKPGSSVKVSCKASGGTFSNYAINWVRQAPGQGLEWMGDIIPVFGTPNYAPNFQGRVIITADESTSTAYMELSSLRSDDTAVYYCARGVWGWDYWGQGTMVTVSS

SEQ ID NO: 18 - protein, 108 aa, Artificial Sequence
  Description of Artificial Sequence: Synthetic polypeptide
EIVLTQSPGTLSLSPGERATLSCRATQSVSSDYLAWYQQKPGQAPRLLIYGASARATGIPDRFSGSVSGTDFTLTVSRLEPEDFAVYFCQQYGSSPFTFGQGTKLEIK

SEQ ID NO: 19 - protein, 120 aa, Artificial Sequence
  Description of Artificial Sequence: Synthetic polypeptide
QVQLVESGGGVVQPGRSLRLSCAASGFTFSNYGMHWVRQAPGKGLDWVAVISYDAISKSYADSVEGRFTISRDNSKNTLYLQMNSLRAEDSAVYYCAKSPTAIDPPFDYWGQGTLVTVSS

SEQ ID NO: 20 - protein, 107 aa, Artificial Sequence
  Description of Artificial Sequence: Synthetic polypeptide
EIVMTQSPATLSVSPGERATLSCWASQSVSSNLAWYQQKPGQAPRLLIYGASTRATGIPARFSASGSGTEFTLTISSLQSEDFAVYYCQQYNNWPPRFGQGTKVEIK

SEQ ID NO: 21 - protein, 121 aa, Artificial Sequence
  Description of Artificial Sequence: Synthetic polypeptide
QVQLVQSGAEVKKPGASVRVSCQASGYIFTTYYMHWVRQAPGQGLEWMGLINPSVGTTTYAQKFQGRVTMTRDTSTRTVYMDLRSLRSEDTAVYYCARGRWDLGESSLDIWGQGTMVTVSS

SEQ ID NO: 22 - protein, 107 aa, Artificial Sequence
  Description of Artificial Sequence: Synthetic polypeptide
DIQLTQSPSSLSAFVGDRVTLTCQASQDIGHHLNWYQQKPGKAPKLLIYDASTLETGVPSRFSGSGSGTDFSFTISSLQPEDIARYYCQQYDKHPLTFGGGTKVEIK

SEQ ID NO: 23 - protein, 123 aa, Artificial Sequence
  Description of Artificial Sequence: Synthetic polypeptide
EVQLLESGGGLVQPGGSLRLSCAASGFTFKDYGMIWVRQAPGKGLEWVSAITGSGSTTYYADSVKGRFTISRDNSKNTLYLQMNYLRAEDTAVYYCAKDFIVGASGVYYFDYWGQGTLVTVSS

SEQ ID NO: 24 - protein, 108 aa, Artificial Sequence
  Description of Artificial Sequence: Synthetic polypeptide
EIVMTQSPAALSVSPGERATLSCRASQSVNSNLAWYQQKPGQAPRLLIYDTSTRATGVPARFSGSGSGTEFTLTISSLQSDDLAVYYCQQYDIWPRRTFGPGTKVDIK

SEQ ID NO: 25 - protein, 115 aa, Artificial Sequence
  Description of Artificial Sequence: Synthetic polypeptide
QVQLVESGGGVVQPGKSLRLSCAASGFTFNNYGMHWVRQAPGKGLEWVAVISFDENTKQYADSVKGRFTISRDNSQNTLFLQMNSLRAEDTAVYYCVRATWFDPWGQGTLVTVSS

SEQ ID NO: 26 - protein, 108 aa, Artificial Sequence
  Description of Artificial Sequence: Synthetic polypeptide
DIQLTQSPSSLSASVGDRVTITCQASHDISNRLNWFQQKPGKAPKLLISDASNLETGVPSRFSGSGSGTDFTFSISSLQPEDFATYYCQHYDSFSRWTFGQGTKVEIK

SEQ ID NO: 27 - protein, 130 aa, Artificial Sequence
  Description of Artificial Sequence: Synthetic polypeptide
EVQLVESGGGLVQPGRSLRLSCAASGFTLSIHWMSWVRQAPGKGLEWVANINQDGSAKYHLDSVKGRFTISRDNAKNALSLQMNSLRGEDTAVYYCARVGSIEAAPQPDRPYYYYYMDVWGKGTTVTVSS

SEQ ID NO: 28 - protein, 108 aa, Artificial Sequence
  Description of Artificial Sequence: Synthetic polypeptide
DIQLTQSPPSLSASVGDRVSITCRTSQSIYNYLNWYQHKPGKAPKLLIFAASSLQGGVPTRFSGSGSGTEFTLTISSLQPEDFAIYYCQQSYSTPALTFGGGTKVEIK

SEQ ID NO: 29 - protein, 130 aa, Artificial Sequence
  Description of Artificial Sequence: Synthetic polypeptide
QVQLVESGGGLVKPGGSLRLSCTASGFTFSDYHLSWVRQAPGKGLELVSYIFSSGSPMFYADSLEGRFTISRDNAKNSLYLQMNSLRAEDTAVYYCARVGHQLAKGDSFNPYYYYYMDVWGKGTTVTVSS

SEQ ID NO: 30 - protein, 108 aa, Artificial Sequence
  Description of Artificial Sequence: Synthetic polypeptide
DIQLTQSPSSLSASVGDRVTITCRASQSISSYLNWYQKKPGKAPKLLIYAASTLQSGVPSRFSGSGSGTDFTLTISSLQPEDFATYYCQQSYSTPALTFGGGTKVEIK

SEQ ID NO: 31 - protein, 117 aa, Artificial Sequence
  Description of Artificial Sequence: Synthetic polypeptide
QVQLVQSGAEVKKPGASVKVSCKTSGYTFTHYGVNWVRQAPGQGLEWVGWIAGYNGDTNYAQKFQGRVTLTTHTSTNTAYMELRSLKSDDTAVYFCARAGGYSGGYWGQGTLVTVSS

SEQ ID NO: 32 - protein, 107 aa, Artificial Sequence
  Description of Artificial Sequence: Synthetic polypeptide
DIQLTQSPPSLSASVGDRVTITCQASQDIRNYLHWYQQKPGKAPKLLIYDASNLETGVPSRFTGSGSGTDFTFTIDSLQPEDIATYYCQQYDNNRLTFGGGTKVEIK

SEQ ID NO: 33 - protein, 119 aa, Artificial Sequence
  Description of Artificial Sequence: Synthetic polypeptide
QLVQSGPEVKKPGTSVKVSCKTSGFTFTTSAIQWVRQARGQRPEWIGWIIVGSGYTHYAQRFQERVTITRDISTRTAYMELSSLRSEDTAVYYCAADIREGWGGPSDYWGQGTLVTVSS

SEQ ID NO: 34 - protein, 108 aa, Artificial Sequence
  Description of Artificial Sequence: Synthetic polypeptide
EIVLTQSPGTLSLSPGERATLSCRASQSVSNSYVAWYQQKPGQAPRLLIYAASGRATGIPDRFSGSGSGTDFTLTISRLAPEDVAVYYCQQYGSSPLTFGGGTKVEIK

SEQ ID NO: 35 - protein, 122 aa, Artificial Sequence
  Description of Artificial Sequence: Synthetic polypeptide
QVQLVESGGGVVQPGRSLRLSCAASGFTFSDYAIHWVRQSPGRGLEWMALIWDDGSVKHYRDSVKGRFTISRDNSKNTVFLQMNSLRAEDTAVYYCAKDLDRGGSSSPFDHWGQGTLVTVSS

SEQ ID NO: 36 - protein, 107 aa, Artificial Sequence
  Description of Artificial Sequence: Synthetic polypeptide
EIVLTQSPATLSLSPGERATLSCRASQNVNTYLAWYQQKPGRAPRLVIYEASNRATGIPARFSGSGSGTDFTLTISSLEAEDSAVYYCQQRNTWPLSFGGGTKVEIK

SEQ ID NO: 37 - protein, 131 aa, Artificial Sequence
  Description of Artificial Sequence: Synthetic polypeptide
VQLVETGGGLIQPGGSLRLSCAASGFTVSSNFMSWVRQAPGKGLEWVSVLHSDGTTYHAVSVKGRFAISRDNSRNTLYLQMNSLRTEDTAIYYCARVASLEANCGADCSFVPYYYYYMDVWGKGTTVTVSS

SEQ ID NO: 38 - protein, 108 aa, Artificial Sequence
  Description of Artificial Sequence: Synthetic polypeptide
DIQLTQSPSSLSASVGDRVTITCRASQSISNYLNWYQHKPGKAPKLLIYAASTLQGGVPSRFSGSGSGTDFTLSISSLQPEDIATYYCQQSYSTPPLTFGGGTKVEIK

SEQ ID NO: 39 - protein, 127 aa, Artificial Sequence
  Description of Artificial Sequence: Synthetic polypeptide
QVQLVQSGADVKKPGASVKVSCKASGYSFTGYHIHWVRQAPGQGLEWMGWINPKSGGTNFAQKFQGRVTMTRDTSLSTVYMDLSSLKSDDTAVYYCARDSERYDFWSTYFSTPTDYWGQGTLVTVSS

SEQ ID NO: 40 - protein, 107 aa, Artificial Sequence
  Description of Artificial Sequence: Synthetic polypeptide
DIQMTQSPSTLSASVGDRVTITCRASQSIVTWVAWYQQKPGKAPKLLIHDASSLHSGVPSRFSGSGSGTDFTLTISSLQPDDSASYYCQQYNSYSWTFGQGTKVEIK

SEQ ID NO: 41 - protein, 119 aa, Artificial Sequence
  Description of Artificial Sequence: Synthetic polypeptide
QVQLVQSGAEVKKPGASVKVSCKASGYTFTGYYMHWVRQAPGQGLQWMGRINPNSGGTNYVQKFQGRVTMTRDMSISTAYMELSRLRPDDTAVYYCARDGGTGVCMDVWGLGTTVTVSS

SEQ ID NO: 42 - protein, 110 aa, Artificial Sequence
  Description of Artificial Sequence: Synthetic polypeptide
QSALTQPPSASGSPGQSVTISCTGTNSDIGAYNYVSWYQQHPGKAPKLMIYEVSKRPSGVPDRFSGSKSGNTASLTVSGLQAEDEADYYCISYAGSNNLVFGGGTKLNVL

SEQ ID NO: 43 - protein, 117 aa, Artificial Sequence
  Description of Artificial Sequence: Synthetic polypeptide
QVQLVQSGAEVKKPGSSVKVSCKASGGTFSNYFFSWVRQAPGQGLEWMGGIIPVFGTTRYAQKFQGRVTITADESTSTAYMELSSLRSEDTALYYCARDDSMVLSDWGQGTLVTVSS

SEQ ID NO: 44 - protein, 107 aa, Artificial Sequence
  Description of Artificial Sequence: Synthetic polypeptide
DIQMTQSPSSLSASVGDRVTITCRASQGIRNDLGWYQQKPGQPPKRLIYEASTLLSGVPSRFSGSGSGTEFTLTISSLQPEDFAIYYCLQHNSYPLTFGGGTKVEIK

SEQ ID NO: 45 - protein, 117 aa, Artificial Sequence
  Description of Artificial Sequence: Synthetic polypeptide
QVQLVQSGAEVKKPGSSVKVSCKASGGTFSNFAINWVRQAPGQGLEWMGGIIPVFGTPNYAPRLQGRLTITADESTSTAYMELSSLRSEDSAVYYCARDTAMVLDYWGQGTLVTVSS

SEQ ID NO: 46 - protein, 107 aa, Artificial Sequence
  Description of Artificial Sequence: Synthetic polypeptide
DIQMTQSPSSLSASVGDRVTITCRASQGIRNDLAWYQQKPGKAPKRLISAASILESGVPSRFSGSGSGTEFTLTISSLQPDDFASYYCLQHKSYPLTFGGGTKVEIK

SEQ ID NO: 47 - protein, 118 aa, Artificial Sequence
  Description of Artificial Sequence: Synthetic polypeptide
VQLVESGGGVVRPGRSLRLSCAASGFTFNHFGMHWVRQAPGKGLEWVAVISYDGSTQYYADSVKGRFTISRDNSKNTLYLQMNSLRLEDTAVYYCAKEGGGTGANDYWGQGSLVTVSS

SEQ ID NO: 48 - protein, 107 aa, Artificial Sequence
  Description of Artificial Sequence: Synthetic polypeptide
DIQMTQSPSTLSASVGDRVTITCRASQSLSTWLAWYQQKPGKAPRLLIYLASGLESGVPSRFSGSGSGTEFTLTISSLQPDDFATYYCQQYNRYPWTFGQGTKVEIK

SEQ ID NO: 49 - protein, 119 aa, Artificial Sequence
  Description of Artificial Sequence: Synthetic polypeptide
QVQLVQSGAEVKKPGSSVKVSCKTSGGTFNTYTITWLRQAPGQGLEWMGGIIPIFGTANYAQKFQGRVTITADESSSTAYMELSSLRSEDTAVYYCARDDGGGSYSAYWGQGTLVTVSS

SEQ ID NO: 50 - protein, 112 aa, Artificial Sequence
  Description of Artificial Sequence: Synthetic polypeptide
DIVMTQTPLSLSVTPGQPASISCKSSQSLLHRDGKTYLHWHLQRPGQPPQPLIYEVSNRFSGVPDRFSGSGSGTHFTLRISRVEAEDVGVYYCMQSIQLPLTFGGGTKVEIK

SEQ ID NO: 51 - protein, 116 aa, Artificial Sequence
  Description of Artificial Sequence: Synthetic polypeptide
VQLVESGGGVVQPGRSLRLSCAGSGFTFSHYVMHWVRQAPGKGLEWVTLISYDGSNKYYADSVKGRFIISRDDSKNTLYLQMNSLRGDDTAVYYCARGPYGPFDYWGQGTLVTVSS

SEQ ID NO: 52 - protein, 110 aa, Artificial Sequence
  Description of Artificial Sequence: Synthetic polypeptide
QSALTQPASVSGSPGQSITISCTGTSSDVGGYNYVSWYQQHPGKAPKLMIYEVSNRPSGVSNRFSGSKSANTASLTISGLQAEDEADYYCSSYTSSSTYVFGSGTRVTVL

SEQ ID NO: 53 - protein, 120 aa, Artificial Sequence
  Description of Artificial Sequence: Synthetic polypeptide
EVQLVESGGGLVQPGGSLRLSCAVSGLSFGDHTMNWVRQAPGKGLEWVAYISSTSSAIYYAASVEGRFTVSRDDAKNSLYLQMNSLRAEDTAVYYCAREHSSHYSVFDYWGQGTLVTVSS

SEQ ID NO: 54 - protein, 108 aa, Artificial Sequence
  Description of Artificial Sequence: Synthetic polypeptide
DIQMTQSPSTLSASVGDRVTITCRASQSISRWLAWYQQKPGKAPKLLIYKASTLESGVPSRFSGSGSGTEFTLTISSLQPDDFATYYCQQFNTFSALTFGGGTKVEIK

SEQ ID NO: 55 - protein, 120 aa, Artificial Sequence
  Description of Artificial Sequence: Synthetic polypeptide
EVQLLESGGGLVKPGGSLRLSCEASGFTFSYYNMNWVRQAPGRGLEWVSSISDSSSYTYYTESLKGRFTISRDNAKNSLYLQMNSLRVEDTAVYYCARDVAARYAYFDLWGQGTLVTVSS

SEQ ID NO: 56 - protein, 108 aa, Artificial Sequence
  Description of Artificial Sequence: Synthetic polypeptide
DIQMTQSPSTLSASVGDRVTITCRASQSISSWLAWYQQKPGKAPKLLIYKASNLESGVPSRFSGSGSGTEFTLTISSLQPDDFATYYCQQYNTFSALTFGGGTKVEIK

SEQ ID NO: 57 - protein, 120 aa, Artificial Sequence
  Description of Artificial Sequence: Synthetic polypeptide
EVQLLESGGGLVKPGGSLRLSCAASGLTFTAYRMNWVRQAPGKGLEWLSSISNTNGDIYYADSVKGRFTISRDNAKNSLYLQMNSLRADDTAVYYCARDVASNYAYFDLWGQGTLVTVSS

SEQ ID NO: 58 - protein, 108 aa, Artificial Sequence
  Description of Artificial Sequence: Synthetic polypeptide
DIQMTQSPSTLSASVGDRVTITCRASQSISTWLAWYQQKPGKAPKLLIYKASNLQSGVPSRFSGRGSGTAFTLTISSLQPDDFGTYYCQQYNTYSAVTFGGGTKVEIK

SEQ ID NO: 59 - protein, 120 aa, Artificial Sequence
  Description of Artificial Sequence: Synthetic polypeptide
QVQLVESGGGGVQPGRSLRLSCAASGFTFISYALHWVRQAPGKGLEWVAVISYDGSNKYYADSVKGRFTISRDNSKNTLYLQMNSLRPEDTAVYYCARLAGATMGLSDYWGQGTLVTVSS

SEQ ID NO: 60 - protein, 111 aa, Artificial Sequence
  Description of Artificial Sequence: Synthetic polypeptide
QLVLTQSSSASASLGSSVKLTCTLSSGHSNYIIAWHQQQPGKAPRYLMNLEGSGNYNKGSGVPDRFSGSSSGADRYLSISNLQSEDEADYYCETWASNTRVFGGGTKLAVL

SEQ ID NO: 61 - protein, 120 aa, Artificial Sequence
  Description of Artificial Sequence: Synthetic polypeptide
QVQLVESGGGVVQPGRSLRLSCAASGFTFSSYGMHWVRQAPGKGLEWAAVISYDGSDKFYADSVKGRFTISRDNSKNTLFLQMNSLRAEDSAIYYCAKTAGNLFGVVVIWGQGTLVTVSS

SEQ ID NO: 62 - protein, 111 aa, Artificial Sequence
  Description of Artificial Sequence: Synthetic polypeptide
QLVLTQSSSASASLGSSVRLTCTLSSGHKSYIIAWHQQQPGKAPRYLMKLEPGGSSNKGSGVPDRFSGSSSGADRYLTISNLQSEDEADYYCQTWDINTLVLGGGTKLTVL

SEQ ID NO: 63 - protein, 124 aa, Artificial Sequence
  Description of Artificial Sequence: Synthetic polypeptide
QVQLVESGGGVVQPGRSLRLSCAASGFTFSSYGMHWVRQAPGKGLEWVAVIWHDGSNDYYPDSVKDRFTISRDNSKNTVYLQMNSLRAEDTAIYYCARDYCGRNGCIDNWFDPWGQGTLVTVSS

SEQ ID NO: 64 - protein, 107 aa, Artificial Sequence
  Description of Artificial Sequence: Synthetic polypeptide
EIVMTQSPATLSVSPGERATLSCRASQSVSSNLAWYQQKPGQAPRLLIYGASTRATGIPARFSGSGSGTEFTLTINSLQSEDFAVYYCQQYDYWPLTFGGGTKVEIK

SEQ ID NO: 65 - protein, 121 aa, Artificial Sequence
  Description of Artificial Sequence: Synthetic polypeptide
QVQLVESGGGVVQPGRSLRLSCVVSGFTFSNYGMHWVRQAPGKGLEWVAVISDDGSQKEYGDSVKGRFTISRDNSKNTVYLQMDSLRAEDTALYYCGKDPARWIDNWIESWGQGILVTVSS

SEQ ID NO: 66 - protein, 107 aa, Artificial Sequence
  Description of Artificial Sequence: Synthetic polypeptide
EIVMTQSPATLSLSPGERATLSCRASQSVTTNLAWYQQKPGQAPSLLIFGASTRATGVPARFSGSGSGTEFTLTISSLQPEDFAVYYCQQYNNWPLTFGGGTKVEIK

SEQ ID NO: 67 - protein, 121 aa, Artificial Sequence
  Description of Artificial Sequence: Synthetic polypeptide
QVQLVESGGGVVQPGRSLRLSCAATGFTFSTYAMHWVRQAPGKGLEWVAVISDDGSQENYGDSVKGRFTISRDNSKNTLILQMNSLRLDDTALYFCAKDPASWVDNWFDSWGQGTLVTVSS

SEQ ID NO: 68 - protein, 107 aa, Artificial Sequence
  Description of Artificial Sequence: Synthetic polypeptide
EIVMTQSPPTLSLSPGERATLSCRASRSVGTNLAWYQQKPGQAPRLLMSGASTRATGIPDRFSASGSGTEFTLTISSLQSEDFAVYYCQQYDYWPLTFGGGTKVEIK

SEQ ID NO: 69 - protein, 115 aa, Artificial Sequence
  Description of Artificial Sequence: Synthetic polypeptide
QVQLVQSGAEVKKPGASVKVSCKASGYTFRNYAIHWVRQAPGQRPEWMGWIDAGSYKTKYSQKFQGRLTITRDISASTAYMELSSLRSEDTAIYFCARGGWFDPWGQGTLVTVSS

SEQ ID NO: 70 - protein, 107 aa, Artificial Sequence
  Description of Artificial Sequence: Synthetic polypeptide
IRMTQSPSSLSASVGDRVTITCQASHDISNQLNWFQQKPGKAPKLLILDASNLEAGVPSRFSGSGSGTHFTFTISSLQPEDFATYYCQHYDSLSTWTFGQGTKVEIK

SEQ ID NO: 71 - protein, 120 aa, Artificial Sequence
  Description of Artificial Sequence: Synthetic polypeptide
QVQLVESGGGVVQPGRSLRLSCAASGFTFSSYGMHWVRQAPGKGLEWVALIWYDGSDKYYTDSVKGRFTISRDNSKKTLYLQMNSLRAEDTAVYYCARGTGNSYGPFEYWGQGTLVTVSS

SEQ ID NO: 72 - protein, 111 aa, Artificial Sequence
  Description of Artificial Sequence: Synthetic polypeptide
QPVLTQSPSASASLGAPVKLTCTLSSGHSNYVIAWHQQQPERGPRYLMKLNGDGSHNKGDGIPDRFSGSSSGAEYFLTISSLQSEDEADYYCQTWGTGRVVFGGGTKLTVL

SEQ ID NO: 73 - protein, 120 aa, Artificial Sequence
  Description of Artificial Sequence: Synthetic polypeptide
QVQLVESGGGVVQPGRSLRLSCAASGFSFGSYGMHWVRQAPGKGLAWVAVIWYDGSDKYYADSVKGRFTISRDNSKNTLYLQMNNLRAEDTAVYYCARSKGNSYGPFDYWGPGTLVTVSS

SEQ ID NO: 74 - protein, 111 aa, Artificial Sequence
  Description of Artificial Sequence: Synthetic polypeptide
QPVLTQSPSASASLGASVKLTCTLSSGHSGYVIAWHQQHPGKGPRYLMELNSDGSHIKGDGIPDRFSGSSSGAERYLTISSLQSEDEADYYCQTWGTGIVLFGGGTKLTVL

SEQ ID NO: 75 - protein, 119 aa, Artificial Sequence
  Description of Artificial Sequence: Synthetic polypeptide
QVQLVQSGAEVKKPGSSVKVSCKTSGGTFSNYAINWVRQAPGQGLEWMGGIIPVFGTPNYAQRFQGRVTISADESTSTSYMEVNSLTYEDTAVYYCARDGGASAAEDYWGQGTLVTVSS

SEQ ID NO: 76 - protein, 106 aa, Artificial Sequence
  Description of Artificial Sequence: Synthetic polypeptide
IRMTQSPSSLSASVGDRVTISCRASQSISTYLNWYQQKPGKAPKLLIYGASTLETAFPSRFSGSGSGTDFTLTISSLQPEDFATYYCQQSFRTPRTFGQGTRLEIK

SEQ ID NO: 77 - protein, 119 aa, Artificial Sequence
  Description of Artificial Sequence: Synthetic polypeptide
QVQLVQSGAEVKKPGSSVKVSCKASAGTFSTYAFSWVRQAPGQGLEWMGTLIPVFSTPYYSQTLQGRLTITADQSTSTVYMELSSLRSEDTALYYCARGGGAVAGNAYWGQGTLVTVSS

SEQ ID NO: 78 - protein, 108 aa, Artificial Sequence
  Description of Artificial Sequence: Synthetic polypeptide
DIQMTQSPSTLSASVGDRVTITCRASQSISSWLAWYQQKPGKAPKLLIYEASNLETGVPSRFSGSGSGTEFTLTISSLQPDDFATYYCQKYDSYSSLTFGGGTKVEIK

SEQ ID NO: 79 - protein, 118 aa, Artificial Sequence
  Description of Artificial Sequence: Synthetic polypeptide
QVQLVQSGAEVKKPGSSVKVSCKVSGGSFTNYAINWVRQAPGQGFEWMGGIIPFFKTPNYAQRFQGRVTITADESTSTAYMELSGLRSDDTAMYYCGRDGGSGVPDYWGQGTLVTVSS

SEQ ID NO: 80 - protein, 107 aa, Artificial Sequence
  Description of Artificial Sequence: Synthetic polypeptide
DIQLTQSPSSLSASVGDRVTITCRASQGINNYLAWFQQKPGKAPKSLIYEAANLQSGVPSKFSGSGSGTEFTLTISSLQPEDIATYYCQQYNSYPWTFGQGTKVEIK

SEQ ID NO: 81 - protein, 132 aa, Artificial Sequence
  Description of Artificial Sequence: Synthetic polypeptide
EVQLLESGGGLVQPGGSLRLSCAASGFTFSSSAMSWVRQAPGKGLEWVSSMSGSDDTTYFADSVKGRFTISRDNSESTLYLQMNSLRAEDTAVYYCARLNYYYDTSGYYSGPPFYFYYMDVWGKGTTVTVSS

SEQ ID NO: 82 - protein, 107 aa, Artificial Sequence
  Description of Artificial Sequence: Synthetic polypeptide
DIQMTQSPSTLSAFVGDRVTITCRASQSISSWLAWYQQKPGKAPKLLIYKASSLESGVPSRFSGSGSGTEFTLTISSLQPDDFATYYCQQFISYPYTFGQGTKLEIK

SEQ ID NO: 83 - protein, 118 aa, Artificial Sequence
  Description of Artificial Sequence: Synthetic polypeptide
QVQLVQSGAEVKKPGSSVKVSCKSFGGTFDNYAITWVRQAPGQGLEWMGRIIPFFRTPNYAQRLQGRLTITADESTSTVFMELSRLRSEDTAMYYCTRDGGLGSFDYWGQGTLVTVSS

SEQ ID NO: 84 - protein, 112 aa, Artificial Sequence
  Description of Artificial Sequence: Synthetic polypeptide
EIVMTQSPLSLPVTPGEPASISCRSSQSLVHRTGYNYLDWYLQKPGQPPHLLIYMGSNRASGVPDRFSGSGSGTEFTLKISRVEAEDVGIYYCMQALQTPPTFGQGTKVEIK

SEQ ID NO: 85 - protein, 118 aa, Artificial Sequence
  Description of Artificial Sequence: Synthetic polypeptide
QVQLVQSGAEVKKPGSSVKVSCKASGGTFSNYAINWVRQAPGQGLEYMGRIIPIFGTPNYAQKFQGRVTITADKSTSTAYMEVSSLRPEDTAVYYCARDGGAHLFDYWGQGTLVTVSS

SEQ ID NO: 86 - protein, 112 aa, Artificial Sequence
  Description of Artificial Sequence: Synthetic polypeptide
DVVMTQSPLSLPVTLGQPASISCRSSQSLVHTDGDIYLNWFQQRPGQSPRRLIYRVSNRDSGVPDRFSGSGSGTDFTLRISRVEAEDVGVYYCMQGTHWPPTFGQGTKVEIK

SEQ ID NO: 87 - protein, 119 aa, Artificial Sequence
  Description of Artificial Sequence: Synthetic polypeptide
QVQLVQSGAEVKKPGSSVKVSCKASGGTFSNYVISWVRQAPGQGLEWMGGIIPIFGTAKYAQKFQGRVTITADESTSTAYMELSSLRSEDTAVYFCARAGGAVAGLDYWGQGTLVTVSS

SEQ ID NO: 88 - protein, 108 aa, Artificial Sequence
  Description of Artificial Sequence: Synthetic polypeptide
DIQMTQSPSTLSASVGDRVTITCRASQSINSWLAWYQQKPGKAPKLLIYKASNLEGGVPSRFSGSGSGTEFTLTISSLQPDDFAAYYCQQYNTYSGGTFGQGTKVEIK

SEQ ID NO: 89 - protein, 123 aa, Artificial Sequence
  Description of Artificial Sequence: Synthetic polypeptide
VQLVESGGGLIQPGGSLRLSCAASGFSFSSHSMNWVRQAPGKGLEWVSYISSSSIDIYYADSVKGRFAISRDNGRNTLYLQMNSLRAEDTAVYFCARETYESGSGYYEYFDYWGQGTLVTVSS

SEQ ID NO: 90 - protein, 108 aa, Artificial Sequence
  Description of Artificial Sequence: Synthetic polypeptide
DIQMTQSPSTLSASLGDRVTITCRASQTISRWLAWYQQKPGKAPKLLIYRASNLHSGVPSRFSGSGSGTEFTLTISSLQPDDSATYYCQQYNTFSRLTFGGGTKVEIK

SEQ ID NO: 91 - protein, 116 aa, Artificial Sequence
  Description of Artificial Sequence: Synthetic polypeptide
QLVQSGPDVKKPGTSVKVSCKASGFISSISAVHWVRQARGQRLEWMGWVVVASGNTNYAQKFHERVTITRDMSTSTVYMELSSLRSEDTAVYYCAAGPRLRWFDPWGQGTLVTVSS

SEQ ID NO: 92 - protein, 113 aa, Artificial Sequence
  Description of Artificial Sequence: Synthetic polypeptide
DIVMTQSPDSLAVSLGERATINCKSSQSVLYSSSNMNYLAWYQQKPGHPPKLLIYWASTRESGVPDRFSGGGSGTDFTLTISSLQAEDVAVYFCQQYYTTPLTFGGGTKVEIK

SEQ ID NO: 93 - protein, 123 aa, Artificial Sequence
  Description of Artificial Sequence: Synthetic polypeptide
EVQLVESGGGLVLPGGYLRLSCEASGFTFNNFWMSWVRQAPGKGLEWVANIKGDATESHYVDSVKGRFTISRDNAKRSLHLQMNSLRADDTAVYYCARARGRPYWGGDAFDIWGQGTMVTVSS

SEQ ID NO: 94 - protein, 107 aa, Artificial Sequence
  Description of Artificial Sequence: Synthetic polypeptide
EIVMTQSPATLSVSPGERATLSCRASQTVNSNLAWYQQKPGQAPRLLIYDATIRATGIPARFSGSGSTTDFTLTISSLQSEDFAVYYCQQYNNWPRTFGQGTKVEIK

SEQ ID NO: 95 - protein, 128 aa, Artificial Sequence
  Description of Artificial Sequence: Synthetic polypeptide
  MOD_RES (19)..(19): Any amino acid
QVQLVESGGGLVKPGGSLXLSCAASGFTFSDYQMNWIRQAPGKGLEWISSIIGRGSTIYYADSVKGRFTMSRDNAKKSLYLQMNSLRAEDTAVYYCARDFTLGNFWSGFLNYNWFDPWGQGTLVTVSS

SEQ ID NO: 96 - protein, 110 aa, Artificial Sequence
  Description of Artificial Sequence: Synthetic polypeptide
QSALTQPASVSGSPGQSITISCTGTSSDVGGYSYVSWYQQHPGKAPKLMIYEVSNRPSGVPDRFSGSKSGNTASLTISGLQAEDEADYYCSSYTISNTRVFGGGTKVTVL

SEQ ID NO: 97 - protein, 125 aa, Artificial Sequence
  Description of Artificial Sequence: Synthetic polypeptide
QVQLVQSGAEVTKPGASVKVSCKASGYTFTTYHINWVRQAPGQGLEWMGWVNPKSGDTGYAHKFQGRVTMTRDTSITTAYMELSSLRSEDTAVYYCARDGDFWSGYYLHSWLDPWGQGTLVTVSS

SEQ ID NO: 98 - protein, 109 aa, Artificial Sequence
  Description of Artificial Sequence: Synthetic polypeptide
QSVLTQPPSVSAAPGQKVTISCSGSGSNVGNSYVSWYQHLPGTAPKLLIYDNDKRPSGIPDRFSGSKSGTSAILGITGLQTGDEADYFCGTWDSSLGTVVFGGGTRLTV

SEQ ID NO: 99 - protein, 127 aa, Artificial Sequence
  Description of Artificial Sequence: Synthetic polypeptide
QVQLVQSGAEVKKPGASVKVSCKASGYTFTDYYIHWVRQAPGQGLEWMGWINPTSGGTNYAQKFQGRVTMTRETSISTAYMEFSRLRFDDTAVYYCARSMIFGVVRTPTYYYGMDVWGQGTTVTVSS

SEQ ID NO: 100 - protein, 106 aa, Artificial Sequence
  Description of Artificial Sequence: Synthetic polypeptide
IVMTQSPATLSVSPGERATLSCRASQSISTNLAWYHHKPGQPPRLLIFGASTRATGIPARFSGSGSGTEFTLTISSLQSEDFAVYYCQHYYNWLWTFGQGTKVEIK

SEQ ID NO: 101 - protein, 96 aa, Artificial Sequence
  Description of Artificial Sequence: Synthetic polypeptide
EVQLLESGGGLVQPGESLRLSCVASGFSFSDYAMNWVRQAPGKGLEWVSIISDNGDATEFTAVYFCAKWGLRRLGLSGLGIPLDYWGQGALVTVSS

SEQ ID NO: 102 - protein, 107 aa, Artificial Sequence
  Description of Artificial Sequence: Synthetic polypeptide
IRMTQSPSSLSASVGDRVTVTCRTSQVIGMFLNWYQHKPGKAPKLIIYAASNLHTGVPSRFSGGGSGTDFSLTISSLQPEDFATYYCQQSYSAPSITFGQGTRLEIK

SEQ ID NO: 103 - protein, 125 aa, Artificial Sequence
  Description of Artificial Sequence: Synthetic polypeptide
QVQLVESGGGVVQPGRSLRLSCAASGFRFSSYGMHWVRQAPGKGLEWVAVIWYDGSNKEYRDSVTGRFTISRDNSKNTLYLQMDSLRAEDTAVYFCARDSYPFDEVGPINYFAYWGQGTLVTVSS

SEQ ID NO: 104 - protein, 105 aa, Artificial Sequence
  Description of Artificial Sequence: Synthetic polypeptide
EIVLTQSPATLSLSPGERATLSCRASQTVNLAWYQQKPGQAPRLLIYDASNRATGIPARFSGSGSGTDFTLTISSLEPEDFAVYYCQQRTHWPLTFGPGTKVDIK

SEQ ID NO: 105 - protein, 130 aa, Artificial Sequence
  Description of Artificial Sequence: Synthetic polypeptide
EVQLVESGGGLVQPGGSLRLSCAASGFVFSDHYMDWVRQAPGKGLEWVGRIRNKAASYTAEYAAFVKGRFTLLRDDSQNLLSLQMDNLETDDTAVYYCTREGRDKWGPVTNFYYYGLDVWGQGTTVTVSS

SEQ ID NO: 106 - protein, 105 aa, Artificial Sequence
  Description of Artificial Sequence: Synthetic polypeptide
DIQLTQSPSFLSASVGDRVTITCRASQSINTYLAWYQQRPGKAPNLLIFAASTLQNGVPSRFSGSRSESGTEFTLTISSLQPEDFASYYCQLLWAFGQGTKVEIK

SEQ ID NO: 107 - protein, 128 aa, Artificial Sequence
  Description of Artificial Sequence: Synthetic polypeptide
QVQLVQSGTEVKKPGASVKVSCKASGYTFTGYYIHWVRQAPGQGLEWMGWINPNSGGTNYAQKFQGWVTMTRDTSISTAYMELRRLKSDDTAVYYCARSMIFGVVINPNSYSYGLDVWGQGTTVTVSS

SEQ ID NO: 108 - protein, 107 aa, Artificial Sequence
  Description of Artificial Sequence: Synthetic polypeptide
EIVMTQSPATLSVSPGGRATLSCRASQSVSSNLAWYQQKPGQAPRLLIYGASTRATGIPARFSGSGSGTEFSLTISSLQSEDFGVYYCQHYYNWLWTFGQGTKVEIK

SEQ ID NO: 109 - protein, 132 aa, Artificial Sequence
  Description of Artificial Sequence: Synthetic polypeptide
QVQLVQSGAEVKKPGSSVKVSCKASGGTFSNYAINWVRQAPGQGLEWMGGIIPISSTANYAQRFQGRVTISADESTTTVYMELSSLRSEDTAVYSCARGHYYESGGYYAGPPFYYFYGMDVWGQGTTVTVSS

SEQ ID NO: 110 - protein, 111 aa, Artificial Sequence
  Description of Artificial Sequence: Synthetic polypeptide
DIVMTQSPLSLPVTPGEPASISCRSSQSLLLHNGYNYLDWYLQKPGQSPQLLIYLGSNRASGVPDRFRGSGSGTDFTLKISRVEAEDVGVYYCMQALQTLTFGGGTKVEIK

SEQ ID NO: 111 - protein, 128 aa, Artificial Sequence
  Description of Artificial Sequence: Synthetic polypeptide
QVQLVESGGGLVKPGGSLRLSCAASGFSFSDFYMSWIRQAPGKGLEWVSYISSGGTAIFYADSVKGRFTISRDNSKKSLYLQMNSLRAEDTAVYYCARDFSQGNYWSGFLNYNWFDPWGQGTLVTVSS

SEQ ID NO: 112 - protein, 110 aa, Artificial Sequence
  Description of Artificial Sequence: Synthetic polypeptide
QSALTQPASVSGSPGQSITISCTGTNSDVGGYSYVSWYQQHPGKAPKLMIYEVSNRPSGVPDRFSGSKSGNTASLTISGLRAEDEADYYCSSYTSSTTRVFGGGTKLTVL

SEQ ID NO: 113 - protein, 118 aa, Artificial Sequence
  Description of Artificial Sequence: Synthetic polypeptide
QVQLVQSGAEVKKPGSSVKVSCKASGGTFSHYTINWVRQAPGQGLEWMGSIIPVFRTTQYAPKFQGRVTLSADESTSTAYMEVRSLRSEDTAVYYCARNFGSTGGQYWGQGTLVTVSS

SEQ ID NO: 114 - protein, 107 aa, Artificial Sequence
  Description of Artificial Sequence: Synthetic polypeptide
DIQMTQSPSFLSASVGDRVTITCQASQDISNYLNWYQQKPGKAPKLLIYDASNLETGVPSRFSGSGSGTHFSFTISSLQAEDIGTYYCQQYDNVRLAFGGGTKVEIK

SEQ ID NO: 115 - protein, 117 aa, Artificial Sequence
  Description of Artificial Sequence: Synthetic polypeptide
QVQLVQSGAEVKKPGSSVKVSCKASGGTFRNYAFSWVRLAPGQGLEWMGQIIPFFGTPNYAQKFQGRVTITADESTSTAYMELTSLRSEDTAVYFCARDAFEEMAYWGQGTLVTVSS

SEQ ID NO: 116 - protein, 111 aa, Artificial Sequence
  Description of Artificial Sequence: Synthetic polypeptide
DIVMTQTPLSSHVTLGQPASISCRSSQSLVHSDGNTYLSWLQLRPGQPPRLLIYQISNRFSGVPDRFSGSGAGTDFTLKISRVEADDVGVYYCMQATHGRTFGQGTKVEIK

SEQ ID NO: 117 - protein, 119 aa, Artificial Sequence
  Description of Artificial Sequence: Synthetic polypeptide
QVQLVQSGAEVKKPGSSVKVSCKASGGTFSHYDFSWVRQAPGQGLEWMGGIIPVFRSANYAQKFQGRLTITADESTTTVYMELSSLRSEDTAVYYCARDGGALAAFEYWGLGTLVTVSS

SEQ ID NO: 118 - protein, 112 aa, Artificial Sequence
  Description of Artificial Sequence: Synthetic polypeptide
DIVMTQTPLSLSVTPGQPASISCKSSRSLLHSDGNTYLFWYLQKPGQPPQLLIYEVSNRFSGVSDRFSGSGSGTDFTLKISRVEAEDVGVYYCMQSIQRPRTFGQGTKVEIK

SEQ ID NO: 119 - DNA, 409 bp, Artificial Sequence
  Description of Artificial Sequence: Synthetic polynucleotide
gaggtgcagctggtggagtctgggggaggcttggtacagccagggcggtccctgagactctcctgtacagggtctggattcaactttggtgattatgctattagctgggtccgccaggctccagggaaggggctggagtgggtaggtttcattagaagtaaagctgatggtgggacaagtcaatacgccgcgtctgcgagaggcagattcaccatctctagagatgattccaaaagcatcgtctatctgcaaatgaacagcctgcaaaccgaggacacagccatccactattgtactcgagtgcaaatgcggcgggcggattgcagtggtaacaggtgctatgacgtcccctacttctacttctacatggacgtctggggcatggggaccacggtcaccgtctcctcag

SEQ ID NO: 120 - DNA, 323 bp, Artificial Sequence
  Description of Artificial Sequence: Synthetic polynucleotide
catccggatgacccagtctccatcctccctgtctgcctctgtaggagacagagtcaccatcacttgccgggcaagtcagagcattagcaactatttaaattggtatcagcagaaaccagggaatgcccctaaactcctgatctatgctgcatccagtttgcaaagtggggtcccatcgaggttcagtggcagtggatctgggacagatttcactctcaccatcaacagtctgcaacctgaagattctgcaacttactactgtcaacagagttacagtacccctccgctcactttcggcggagggaccaaggtggaaatcaaac

SEQ ID NO: 121 - DNA, 364 bp, Artificial Sequence
  Description of Artificial Sequence: Synthetic polynucleotide
gaggtgcagctggtggagtttgggggaggcttggttcagcctggggggtccctgagactctcctgtgtagcctctggattcaccttcagtggttatgacatgaactggatccgccaggctccaggaaaggggctggagtggctttcgtacattagtaatagaggtgacaccatatactacgcagactctgtgaggggccgattcaccatttccagagacaacgccaagaactcgctgcatcttcaaatcaacaacctgagagccgaggacacggctttttattactgtgcgagagaacgatattatgacgcgtacaactggttcgacccctggggccagggaaccctggtcaccgtctcctcag

SEQ ID NO: 122 - DNA, 325 bp, Artificial Sequence
  Description of Artificial Sequence: Synthetic polynucleotide
gacatccagttgacccagtctccatccttcctgtctgcatctgtaggagacagagtcaccatcacttgccgggccagtcagggcattagcaggtatttagcctggtatcaacaaaaaccagggaaagcccctaaggtcctgatctatgctgcatccattttgcaaagtggggtcccgtcaaggttcagcggcagtggatctgggacagaattcactctcacaatcagcagcctgcagccggaggatcttgcaacttattactgtcaacagcttaatagttccccgatgtacacttttggccaggggaccaaggtggaaatcaaac

SEQ ID NO: 123 - DNA, 354 bp, Artificial Sequence
  Description of Artificial Sequence: Synthetic polynucleotide
caggtgcagctggtgcagtctgggactgaggtgaagaagcctgggtcctcggtgaaggtctcttgcagggcttctggaggcaccttcagaactatgctatcagctgggtgcgacaggcccctggacaagggcttaagtggatgggagggatcatccctgtctgggcttcagcaacgtacgctcagatcttccagggcagactcacgattaccgcggacgaatccacgactacagcctacatggagttgagcagcctgagatctgaggacacgggcttttattactgtgcgagagaggggggaagtgggagctacgactactggggccagggaaccctggtcaccgtctcctcag

SEQ ID NO: 124 - DNA, 337 bp, Artificial Sequence
  Description of Artificial Sequence: Synthetic polynucleotide
gatattgtgatgactcagtctccactctccctgcccgtcacccctggagagccggcctccatctcctgtaggtctagtcagagcctcctgcatagagatggatacaactatctggattggtacctgcagaggccagggcagtctccacagctcctgatctatttggcttctaatcgggcctccggggtccctgacaggttcagtggcagtggatcaggcacagattttacactgaaaatcagcagagtggaggctgaggatgttggggtttattactgcatgcaagctctgcgaactcctcgagcttttggccaggggaccaagctggagatcaaac

SEQ ID NO: 125 - DNA, 355 bp, Artificial Sequence
  Description of Artificial Sequence: Synthetic polynucleotide
caggtgcagctggtgcagtctggggctgaggtgaagaagcctgggtcctcggtgaaggtctcctgcaagtcttctggaggcatcttcagcaactttgctatcaattggatacgacaggcccctgggcaagggcttgtttggatgggagggatcatccctgccttccgaacagcaaactacgcacagagagtccagggcagagtcacgattaccgcggacgagtccacgagcacagtccacttggaagtgagcgccctgagacctgaggacaccgccatttattactgtgcgagagtgggaggtttggggagttatgactattggggccagggaacgctggtcaccgtctcctcag

SEQ ID NO: 126 - DNA, 337 bp, Artificial Sequence
  Description of Artificial Sequence: Synthetic polynucleotide
gatattgtgatgactcagtctccactctccctgtccgtcactcttggagagccggcctccatctcctgcaggtctagtcagagcctcctgcatagggatggaaacaactatttggattggtacctgcagaagccaggacggtctccacaactcctgatctatttgggttctagtcgggcctccggggtccctgaccggttcagtggcagtggatcaggcacagattttacactgaaaatcagcagagtggaggctgaggatattggggtttattactgcatgcaagctctccaaactccccacacttttggccaggggaccaagctggagatcaaac

SEQ ID NO: 127 - DNA, 355 bp, Artificial Sequence
  Description of Artificial Sequence: Synthetic polynucleotide
caggtgcagctggtgcagtctggggctgaggtgaagaagcctgggtcctcggtgaaggtctcctgcaaggcttctggaggcaccttcagccactatgcctacaactgggtgcgacaggcccctggacaagggcttgagtggatgggagggatcatccctgtctttgacacaataacgtacgcacagaagttccagggcagagtcacgattaccgcggacgagtctacggccacagcccacatggagctgagcagcctcagatctgaggacacggccgtgtattactgtgagagaagcggtggttctagcggatctgactactggggccagggaacaatggtcaccgtctcttcag

SEQ ID NO: 128 - DNA, 415 bp, Artificial Sequence
  Description of Artificial Sequence: Synthetic polynucleotide
gacatccagttgacccagtctccatcctccctgtctgcatctgtgggagacagagtcaccatcacttgccaggcgagccaggacatcaataactatttaaattggtatcagaagaaaccagggaaagcccctaagctcctgatctacgatgcatccaatttggaaacaggggtcccatcaaggttcagtggaagtagatctgggacagattttactttcaccatcagcagcctgcagcctgaagatattgcaacatattactgtcaacagtatgataatctccctcggctcactttcggcggagggaccaaggtggagatcaaacgacatccagttgacccagtctccatcctccctgtctgcatctgtgggagacagagtcaccatcacttgccaggcgagccaggacatcaat

SEQ ID NO: 129 - DNA, 355 bp, Artificial Sequence
  Description of Artificial Sequence: Synthetic polynucleotide
caggtgcagctggtgcagtctggggctgaggtgaagaagcctgggtcctcggtgaaggtctcctgcaaggcctctggaggcaccttcagcaactttgctatcagctgggtgcgacaggcccccggacaaggccttgagtggatgggagggatcatccctctctttggtacagcaaactatgcacagaagttccgggccagagtcacaattaccgcggacgaatccacgaacacagcctacgtggagctgagtagtctgagatttgaggacacggccgtgtattattgtgcgagagaggatggtttggggagttatgacgactggggccagggaaccctggtcaccgtctcctcag

SEQ ID NO: 130 - DNA, 337 bp, Artificial Sequence
  Description of Artificial Sequence: Synthetic polynucleotide
gatattgtgatgactcagtctccactctccctgcccgtcactcctggagagccggcctccatctcctgcaggtctagtcagagcctcctgcatagaaatggagacaactatttggattggtacctgcagaagccagggcagtctccacagctcctgatctatttggcttctaatcgggcctccggggtccctgacaggttcagtggcagtggatcaggcacagattttacactgaaaatcagcagagtggaggctgaggatgttggggtttattactgcatgcaagctctacaaactcctcgcacttttggccaggggaccaagctggagatcaaac

SEQ ID NO: 131 - DNA, 352 bp, Artificial Sequence
  Description of Artificial Sequence: Synthetic polynucleotide
caggtgcagctggtgcagtctggggctgaggtgaagaagcctgggtcctcggtgaaggtctcctgcaagacttctggaggcaccttcagcaactttgctatcaactgggtgcgacaggcccctggacaagggcttgagtggatgggagggatcatcccttcctttggtacaccaaactacgcacagaacttccagggcagagtcacgattaccgcggacaagtccacgagcacagcctacatggagctgaccagcctgcgatctgacgacacggccgtctatttctgtgcgaggcggggtggctggggatttgactactggggccagggaacaatggtcaccgtctcttcag

SEQ ID NO: 132 - DNA, 322 bp, Artificial Sequence
  Description of Artificial Sequence: Synthetic polynucleotide
gacatccagttgacccagtctccatcctccctgtctgtatctgtaggagacagagtcaccatcacttgccaggcgagtcaggacattagcaactatttaaattggtatcagcagaaaccagggaaagcccctaaactcctgatttacgatacatccaatttggaaacaggggtcccatcaaggttcagtggaagtggatctgggacagattttactttcaccatcagcagcctgcagcctgaagatattgcgacatattactgtcatcagtatgataatctccgtcacactttcggcggagggaccaaggtggaaatcaaac

SEQ ID NO: 133 - DNA, 349 bp, Artificial Sequence
  Description of Artificial Sequence: Synthetic polynucleotide
caggtgcagctggtgcagtctggggctgaggtgaagaaacatgggtcctcggtgaaggtctcctgcaaggcttctggaggcaccttcagcaactatgcaatcaactgggtgcgacaggcccctggacaagggcttgagtggatgggaaaaatcatcccttcctttggaacacctcactacgcacagaagttccagggtagactcacgataaccgcggacgtctccacgaacacaggctacatggagctgaacagcctgacatctgaggacacggccgtgtattactgtgcgagaggtccctggggttgggaccactggggccagggagcaatggtcaccgtctcttcag

SEQ ID NO: 134 - DNA, 322 bp, Artificial Sequence
  Description of Artificial Sequence: Synthetic polynucleotide
gaaattgtgttgacgcagtctccaggcaccctgtctttgtctccaggggaaagagccaccctctcctgcggggccagtcagagtgttagcagcgactacttagcctggtaccagcagaaacctggccaggctcccaggctcctcatctatggtgcatccggcagggccactggcatcccagacaggttcagtggcagtgggtctgggacagacttcactctcaccatcagcagactgcagcctgaagattttgcagtgtattactgtcagcagtatggtagttcacccactttcggcggagggaccaaggtggagatcaaac

SEQ ID NO: 135 - DNA, 349 bp, Artificial Sequence
  Description of Artificial Sequence: Synthetic polynucleotide
caggtgcagctggtgcagtctggggctgaagtgaagaagcctgggtcctcggtgaaggtctcctgcaaggcctctggaggcaccttcagcaactatgctatcaactgggtgcgacaggcccctggacaagggcttgagtggatgggagacatcatccctgtctttgggacaccaaactacgcaccgaatttccagggccgagtcatcattaccgcggacgaatccacgagcacagcctacatggagctgagcagcctgagatctgacgacacggccgtatattactgtgcgagaggcgtttgggggtgggactactggggccagggaacaatggtcaccgtctcttcag

SEQ ID NO: 136 - DNA, 325 bp, Artificial Sequence
  Description of Artificial Sequence: Synthetic polynucleotide
gaaattgtgttgacgcagtctccaggcaccctgtctttgtctccgggggaaagagccaccctctcctgcagggccactcagagtgttagcagcgactacttagcctggtaccagcagaaacctggccaggctcccaggctcctcatctatggtgcatccgccagggccactggcatcccagacaggttcagtggcagtgtttctgggacagacttcactctcaccgtcagcagactggagcctgaagattttgcagtgtatttctgtcagcagtatggtagctcacctttcacttttggccaggggaccaagctggagatcaaac

SEQ ID NO: 137 - DNA, 360 bp, Artificial Sequence
  Description of Artificial Sequence: Synthetic polynucleotide
caggtgcagctggtggagtctgggggaggcgtggtccagcctgggaggtccctgagactctcctgtgcagcctctggattcaccttcagtaactatggcatgcactgggtccgccaggctccaggcaagggactggactgggtggcagttatttcatatgatgcaattagtaagtcctatgcagactccgtggagggccgattcaccatctccagagacaattccaagaacacgctgtatctgcaaatgaacagcctgagagctgaggactcggctgtctattactgtgcgaaatcaccgacggcgatagatcccccctttgattactggggccagggaaccctggtcaccgtctcctca

SEQ ID NO: 138 - DNA, 322 bp, Artificial Sequence
  Description of Artificial Sequence: Synthetic polynucleotide
gaaatagtgatgacgcagtctccagccaccctgtctgtgtctccaggggaaagagccaccctctcctgctgggccagtcagagtgttagcagcaacttggcctggtaccagcagaaacctggccaggctcccaggctcctcatctatggtgcatccaccagggccactggtatcccagccaggttcagtgccagtgggtctgggacagagttcactctcaccatcagcagcctgcagtctgaagattttgcagtttattactgtcagcagtataataactggcctccgaggttcggccaagggaccaaggtggagatcaaac

SEQ ID NO: 139 - DNA, 364 bp, Artificial Sequence
  Description of Artificial Sequence: Synthetic polynucleotide
caggtgcagctggtgcagtctggggctgaggtgaagaagcctggggcctcagtgagggtttcctgccaggcatctggatacatcttcaccacctactatatgcactgggtgcggcaggcccctggacaaggccttgagtggatgggactaatcaaccctagtgttggtaccacaacctacgcacagaagtttcagggcagagtcaccatgaccagggacacgtccacgaggacagtctatatggacctgaggagcctgagatctgaagacacggccgtgtattactgtgctcgggggagatgggatctaggggagagttctcttgatatttggggccaagggacaatggtcaccgtctcttcag

SEQ ID NO: 140 - DNA, 322 bp, Artificial Sequence
  Description of Artificial Sequence: Synthetic polynucleotide
gacatccagttgacccagtctccatcctccctgtctgcatttgtaggagacagagtcaccctcacttgccaggcgagtcaggacattgggcaccatttaaattggtatcaacagaaaccagggaaagcccccaagctcctgatctacgatgcatccaccttggaaacaggggtcccatcaaggttcagtggaagtggatctgggacagattttagtttcaccatcagcagcctgcagcctgaagatattgcaagatattactgtcaacagtatgataagcacccgctcactttcggcggagggaccaaggtggaaatcaaac

SEQ ID NO: 141 - DNA, 370 bp, Artificial Sequence
  Description of Artificial Sequence: Synthetic polynucleotide
gaggtgcagctgttggagtctgggggaggcttggtacagcctggggggtccctgagactctcctgtgcagcctctggattcacttttaaagattatggcatgatctgggtccgccaggctccggggaaggggctggagtgggtctcagctatcactggcagtggttctaccacatactacgcagactccgtgaagggccgcttcaccatctccagagacaattccaagaacacactgtatctgcaaatgaactacctgagagccgaggacacggccgtgtattactgtgcgaaagattttatagtgggggctagtggagtctactactttgactactggggccagggaaccctggtcaccgtctcctcag

SEQ ID NO: 142 - DNA, 325 bp, Artificial Sequence
  Description of Artificial Sequence: Synthetic polynucleotide
gaaatagtgatgacgcagtctccagccgccctgtctgtgtctccaggggaaagagccaccctctcctgcagggccagtcagagtgtgaatagcaacttagcctggtaccagcaaaaacctggccaggctcccaggctcctcatctatgatacatccaccagggccactggtgtcccagccaggttcagtggcagtgggtctgggacagagttcactctcaccatcagcagcctgcagtctgacgatcttgcagtttattactgtcagcaatacgatatctggcctcgtcggactttcggccctgggaccaaagtggatatcaaac

SEQ ID NO: 143 - DNA, 346 bp, Artificial Sequence
  Description of Artificial Sequence: Synthetic polynucleotide
caggtgcagctggtggagtctgggggaggcgtggtccagcctgggaagtccttgagactttcatgtgcagcctctggattcaccttcaataactatggcatgcactgggtccgccaggctccaggcaaggggctggaatgggtggcagttatatcgtttgatgaaaatactaaacagtatgcagactccgtgaagggccgattcaccatctccagagacaattcccagaacacgctgtttctgcaaatgaacagcctgagagccgaggacacggctgtctattactgtgtgagagcaacttggttcgacccctggggccagggaaccctggtcaccgtctcctcag

SEQ ID NO: 144 - DNA, 325 bp, Artificial Sequence
  Description of Artificial Sequence: Synthetic polynucleotide
gacatccagttgacccagtctccatcctccctgtctgcatctgtaggagacagagtcaccatcacttgccaggcgagtcacgacattagcaaccgtttaaactggtttcagcagaaaccagggaaagcccctaagctcctgatctccgatgcatccaatttggaaacaggggtcccatcaaggttcagtggaagtggatctgggacagattttactttcagcattagcagcctgcagcctgaagattttgcaacatattactgtcaacattatgatagtttctctcggtggacgttcggccaggggaccaaggtggagatcaaac

SEQ ID NO: 145 - DNA, 391 bp, Artificial Sequence
  Description of Artificial Sequence: Synthetic polynucleotide
gaagtgcagctggtggagtctgggggaggcttggtccagcctgggaggtccctgagactctcctgtgcagcctctggattcacgttaagtattcattggatgagttgggtccgccaggctcctgggaaggggctggagtgggtggccaacataaatcaagatggaagtgcgaaataccatttggactctgtgaagggccggttcaccatctccagagacaacgccaagaatgcactgtctctgcaaatgaacagcctgagaggcgaggacacggctgtttattactgtgcgagagttggatcaatagaggccgcaccacaacctgatagaccctactactactactacatggacgtctggggcaaagggaccacggtcaccgtctcctcag

SEQ ID NO: 146 - DNA, 325 bp, Artificial Sequence
  Description of Artificial Sequence: Synthetic polynucleotide
gacatccagttgacccagtctccaccctccctgtctgcatctgtgggagacagagtctccatcacttgccggacaagtcagagtatttacaactatttaaattggtatcaacacaaaccagggaaagcccctaaactcctgatttttgctgcatccagtttgcaaggtggcgtcccaacaaggttcagtggcagtggatctgggacagagttcactctcaccatcagcagtctgcaacctgaagattttgcaatttactactgtcaacagagttacagtacccctgcgctcactttcggcggagggaccaaggtggaaatcaaac

SEQ ID NO: 147 - DNA, 391 bp, Artificial Sequence
  Description of Artificial Sequence: Synthetic polynucleotide
caggtgcagctggtggagtctgggggaggcttggtcaagccgggagggtccctgagactctcctgtacagcctctggattcaccttcagtgactaccacctgagctgggtccgccaggctccagggaagggactggaattagtttcatacatttttagtagtgggagtcccatgttctacgcagactcattggagggccgattcaccatctccagggacaacgccaagaactcactgtatcttcagatgaacagcctcagagccgaggacacggccgtctattactgtgcgagagtggggcaccagctggcaaaaggggactcgttcaacccctactactactactacatggacgtctggggcaaagggaccacggtcaccgtctcctcag

SEQ ID NO: 148 - DNA, 325 bp, Artificial Sequence
  Description of Artificial Sequence: Synthetic polynucleotide
gacatccagttgacccagtctccatcctccctgtctgcgtctgttggagacagagtcaccatcacttgccgggcaagtcagagcatcagcagctatttaaattggtatcaaaagaaaccagggaaagcccctaagctcctgatctatgctgcttccactttgcaaagtggggtcccatcaaggttcagtggcagtggatctgggacagatttcactctcaccatcagcagtctgcaacctgaagattttgcaacttactactgtcaacagagttacagcacccctgcgctcactttcggcggagggaccaaggtggaaatcaaac

SEQ ID NO: 149 - DNA, 352 bp, Artificial Sequence
  Description of Artificial Sequence: Synthetic polynucleotide
caggttcagctggtgcagtctggggctgaggtgaagaagcctggggcctcagtgaaggtctcctgcaagacttctggttacacctttacccattatggtgtcaactgggtgcggcaggcccctggacaagggcttgagtgggtgggatggatcgccggttacaatggtgacacaaactatgcacagaagttccagggcagagtcaccctgaccacacacacatccacgaacacagcctacatggaactgaggagcctgaaatctgacgacacggccgtgtacttctgtgcgagagccgggggatatagcggaggctactggggccagggaaccctggtcaccgtctcctcag

SEQ ID NO: 150 - DNA, 322 bp, Artificial Sequence
  Description of Artificial Sequence: Synthetic polynucleotide
gacatccagttgacccagtctccaccctccctgtctgcatctgtaggagacagagtcaccatcacttgccaggcgagtcaggacattcgcaactatttacattggtatcagcagaaaccagggaaagcccctaagctcctgatctacgatgcatccaatttggaaacaggggtcccatcaaggttcactggaagtggatctgggacagattttactttcaccatcgacagcctgcagcctgaagatattgcaacatattactgtcaacagtatgataataaccgtctcactttcggcggagggaccaaggtggagatcaaac

SEQ ID NO: 151 - DNA, 358 bp, Artificial Sequence
  Description of Artificial Sequence: Synthetic polynucleotide
cagctggtacagtctgggcctgaggtgaagaagcctgggacctcagtgaaggtctcctgcaagacctctggattcaccttcactacctctgctattcagtgggtgcgacaggctcgtggacaacgccctgagtggataggatggatcatcgttggcagtggctacacacactacgcacagaggttccaggaaagagtcaccattaccagggacatttccacaagaacagcctacatggagctgagcagcctgagatccgaggacacggccgtctattattgtgcggcagatatcagagagggatgggggggaccttctgactactggggccagggaaccctggtcaccgtctcctcag

SEQ ID NO: 152 - DNA, 325 bp, Artificial Sequence
  Description of Artificial Sequence: Synthetic polynucleotide
gaaattgtgttgacgcagtctccaggcaccctgtctttgtctccaggggaaagagccaccctctcctgcagggccagtcagagtgtcagcaacagctacgtagcctggtaccagcagaaacctggccaggctcccaggctcctcatctatgctgcatccggcagggccactggcatcccagacaggttcagtggcagtgggtctgggacagacttcactctcaccatcagcagactggcgcctgaggatgttgcagtgtattattgtcagcagtatggaagttcaccactcactttcggcggagggaccaaggtggagatcaaac

SEQ ID NO: 153 - DNA, 367 bp, Artificial Sequence
  Description of Artificial Sequence: Synthetic polynucleotide
caggtgcagctggtggagtcggggggaggcgtggtccagcctgggaggtccctgagactctcctgtgcggcgtctggattcaccttcagtgactatgccatacactgggtccgccagtctccaggcagggggctggagtggatggctcttatatgggatgatggaagtgttaaacattatagagactccgtgaagggccgattcaccatctccagagacaattccaagaacacggtgtttctgcagatgaacagcctgagagccgaggacacggctgtgtactattgtgcgaaagatttagacagggggggaagcagctcgccttttgaccactggggccagggaaccctggtcaccgtctcctcag

SEQ ID NO: 154 - DNA, 322 bp, Artificial Sequence
  Description of Artificial Sequence: Synthetic polynucleotide
gaaattgtgttgacacagtctccagccaccctgtctttgtctccaggggaaagagccaccctctcctgcagggccagtcagaatgttaacacctacttagcctggtatcaacagaaacctggccgggctcccaggctcgtcatttatgaagcgtccaacagggccactggcatcccagccaggttcagtggcagtgggtcggggacagacttcaccctcaccatcagcagcctggaggctgaggattctgcagtttattactgtcagcagcgtaacacctggcctctctctttcggcggagggaccaaggtggaaatcaaac

SEQ ID NO: 155 - DNA, 396 bp, Artificial Sequence
  Description of Artificial Sequence: Synthetic polynucleotide
aggtgcagctggtggagactggaggaggcttgatccagcctggggggtccctaagactctcctgtgcagcctctgggttcaccgtcagtagtaacttcatgagctgggtccgccaggctccagggaaggggctggaatgggtctcagttcttcatagcgatggaacaacataccacgcggtctccgtgaagggccgattcgccatctccagagacaattccaggaacacgctgtatcttcaaatgaacagcctgagaaccgaggacacggccatatattactgtgcgagagttgccagcctagaggcgaattgtggtgctgactgctcttttgtcccatactactactactacatggacgtctggggcaaagggaccacggtcaccgtctcctcag

SEQ ID NO: 156 - DNA, 325 bp, Artificial Sequence
  Description of Artificial Sequence: Synthetic polynucleotide
gacatccagttgacccagtctccatcctccctgtctgcatctgtaggagacagagtcaccatcacttgccgggcaagtcagagcattagcaactatttaaattggtatcaacacaagcctgggaaagcccctaagctcctgatctatgctgcatccactttgcaaggtggggtcccatcaaggttcagtggcagtggatctgggacagatttcactctctccatcagcagtctgcaacctgaagatattgcaacttattactgtcaacagagttacagtacccctcccctcactttcggcggagggaccaaggtggaaatcaaac

SEQ ID NO: 157 - DNA, 382 bp, Artificial Sequence
  Description of Artificial Sequence: Synthetic polynucleotide
caggtgcagctggtgcagtctggggctgacgtgaagaagcctggggcctcagttaaggtctcctgcaaggcttctggatacagcttcaccggctaccatatacactgggtacgacaggcccctggacaagggcttgagtggatgggatggatcaatcctaaaagtggtggcacaaactttgcacagaagtttcagggcagggtcaccatgaccagggacacgtccctcagtacagtctatatggacctcagtagcctgaaatctgacgacacggccgtgtattactgtgcgagagattccgagaggtacgatttttggagtacttatttttcgacgcccacggactactggggccagggaaccctggtcaccgtctcctcag

SEQ ID NO: 158 - DNA, 322 bp, Artificial Sequence
  Description of Artificial Sequence: Synthetic polynucleotide
gacatccagatgacccagtctccttccaccctgtctgcatctgtgggagacagagtcaccatcacttgccgggccagtcagagtattgttacttgggtggcctggtatcagcagaagccagggaaggcccctaagctcctgatccatgatgcatccagtttgcatagtggggtcccatcaaggttcagcggcagtggatctgggacagatttcactctcaccatcagcagcctgcagcctgatgattctgcaagttattactgccaacagtataatagttattcgtggacgttcggccaagggaccaaggtggagatcaaac

SEQ ID NO: 159 - DNA, 358 bp, Artificial Sequence
  Description of Artificial Sequence: Synthetic polynucleotide
caggtgcagctggtgcagtctggggctgaggtgaagaagcctggggcctcagtgaaggtctcctgcaaggcttctggatacaccttcaccggctactatatgcactgggtgcgacaggcccctggacaagggcttcagtggatgggacggatcaaccctaacagtggtggcacaaactatgtacagaagtttcagggcagggtcaccatgaccagggacatgtccatcagcacagcctacatggagctgagtaggctgagacctgacgacacggccgtatattactgtgcgagagatggagggactggggtctgtatggacgtctggggcctagggaccacggtcaccgtctcctcag

SEQ ID NO: 160 - DNA, 331 bp, Artificial Sequence
  Description of Artificial Sequence: Synthetic polynucleotide
cagtctgccctgactcagcctccctccgcgtccgggtctcctggacagtcagtcaccatctcctgcactggaaccaacagtgacattggtgcttataactatgtctcctggtaccaacagcacccaggcaaagcccccaaactcatgatttatgaggtcagtaagcggccctcaggggtccctgatcgcttctctggctccaagtctggcaacacggcctccctgaccgtctctgggctccaggctgaggatgaggctgattattactgcatctcatatgcaggcagcaacaatttggtattcggcggagggaccaagctgaacgtcctag

SEQ ID NO: 161 - DNA, 352 bp, Artificial Sequence
  Description of Artificial Sequence: Synthetic polynucleotide
caggtgcagctggtgcagtctggggctgaggtgaagaagcctgggtcttcggtgaaggtctcctgtaaggcttctggaggcaccttcagcaattattttttcagctgggtgcgacaggcccctggacaagggcttgagtggatgggagggatcatccctgtctttggtacaacacgctacgcacagaagttccagggcagagtcacgattaccgcggacgaatctacgagcacagcctacatggagctgagcagcctgagatctgaggacaccgccctatattactgtgcgagagatgactctatggtattaagcgactggggccagggaactctggtcaccgtctcctcag

SEQ ID NO: 162 - DNA, 322 bp, Artificial Sequence
  Description of Artificial Sequence: Synthetic polynucleotide
gacatccagatgacccagtctccatcctccctgtctgcatctgtaggagacagagtcaccatcacttgccgggcaagtcagggcattagaaatgatttaggctggtatcagcagaaaccagggcaaccccctaagcgcctgatctatgaagcatccactttactaagtggggtcccatcaaggttcagcggcagtggatctgggacagaattcactctcacaatcagcagcctgcagcctgaagattttgcgatttattattgtctacagcataatagttacccgctcactttcggcggagggaccaaggtggaaatcaaac

SEQ ID NO: 163 - DNA, 352 bp, Artificial Sequence
  Description of Artificial Sequence: Synthetic polynucleotide
caggtgcagctggtgcagtctggggctgaggtgaagaagcctgggtcctcggtgaaggtctcctgcaaggcttctggaggcaccttcagcaactttgctatcaactgggtgcgacaggcccctggacaagggcttgagtggatgggagggatcatcccggtctttggaacaccaaactacgcaccgaggctccagggcagactcacgattaccgcggacgaatccacgagcacagcctacatggagctgagtagcctcagatctgaggactcggccgtgtattattgtgcgagagatacggctatggttttggactactggggccagggaaccctggtcaccgtctcctcag

SEQ ID NO: 164 - DNA, 322 bp, Artificial Sequence
  Description of Artificial Sequence: Synthetic polynucleotide
gacatccagatgacccagtctccatcatccctgtctgcatctgtaggagacagagtcaccatcacttgccgggcaagtcagggcattagaaatgatttagcctggtatcagcagaagccagggaaagcccctaagcgcctgatctctgctgcatccattttggaaagtggggtcccatcaaggttcagcggcagtggatctgggacagagttcactctcacaatcagcagcctgcagcctgacgattttgcaagttattactgtctacagcataaaagttacccgctcactttcggaggagggaccaaggtggaaatcaaac

SEQ ID NO: 165 - DNA, 357 bp, Artificial Sequence
  Description of Artificial Sequence: Synthetic polynucleotide
aggtgcagctggtggagtctgggggaggcgtggtccgacctgggaggtccctgagactctcctgtgcagcctctggattcaccttcaaccactttggcatgcactgggtccgccaggctccgggcaaggggctggagtgggtggcagttatttcatatgatggaagtactcaatactatgcagactccgtgaagggccgattcaccatctccagagacaattccaagaacacgctgtatctgcaaatgaacagcctgagacttgaggacacggctgtttattactgtgcgaaagaaggggggggtactggggctaatgactactggggccagggaagcctggtcaccgtctcctcag

SEQ ID NO: 166 - DNA, 322 bp, Artificial Sequence
  Description of Artificial Sequence: Synthetic polynucleotide
gacatccagatgacccagtctccttccaccctgtctgcatctgtcggagacagagtcaccatcacttgccgggccagtcagagtcttagtacttggttggcctggtatcagcagaaaccagggaaagcccctaggctcctgatctatttggcgtctggtttagaaagtggggtcccatcaaggttcagcggcagtggatctgggacagaattcactctcaccatcagcagcctgcagcctgatgattttgcaacttattactgccaacagtataatcgttacccgtggacgttcggccaagggaccaaggtggagatcaaac

SEQ ID NO: 167 - DNA, 357 bp, Artificial Sequence
  Description of Artificial Sequence: Synthetic polynucleotide
caggtgcagctggtgcagtctggggctgaggtgaagaagcctgggtcctcggtgaaggtctcctgcaagacttctgggggcaccttcaaacctatactatcacctggctgcgacaggcccctggacaagggcttgagtggatgggagggatcatccctatctttggtactgcaaactacgcacagaagttccagggcagagtcacgattaccgcggacgaatcctcgagtacagcctacatggaactgagcagcctgagatctgaggacacggccgtctattactgtgcgagagatgacgggggtgggagctactcggcctactggggccagggaaccctggtcaccgtctcctcag

SEQ ID NO: 168 - DNA, 337 bp, Artificial Sequence
  Description of Artificial Sequence: Synthetic polynucleotide
gatattgtgatgacccagactccactctctctgtccgtcacccctggacagccggcctccatctcctgcaagtctagtcagagcctcctgcatcgtgatggaaagacgtatttgcattggcacctgcagaggccaggccagcctccacagcccctgatctatgaagtttccaaccggttctctggagtgccagataggttcagtggcagcgggtcagggacacatttcacactgagaatcagccgggtggaggctgaggatgttggggtttattactgcatgcaaagtatacagcttccgctcactttcggcggagggaccaaggtggaaatcaaac

SEQ ID NO: 169 - DNA, 351 bp, Artificial Sequence
  Description of Artificial Sequence: Synthetic polynucleotide
aggtgcagctggtggagtctgggggaggcgtggtccagcctgggaggtccctgagactctcctgtgcaggctctggattcaccttcagtcactatgttatgcactgggtccgccaggctccaggcaaggggctagagtgggtgacacttatatcatatgatggaagtaataaatactacgcagactccgtgaagggccgattcatcatctccagagacgattccaagaacacgctgtatctgcaaatgaacagcctgagaggtgacgacacggctgtgtattactgtgcgagaggcccttacggtccttttgactactggggccagggaaccctggtcaccgtctcctcag

SEQ ID NO: 170 - DNA, 331 bp, Artificial Sequence
  Description of Artificial Sequence: Synthetic polynucleotide
cagtctgccctgactcagcctgcctccgtgtctgggtctcctggacagtcgatcaccatctcctgcactggaaccagcagtgacgttggtggttataactatgtctcctggtatcaacagcacccaggcaaagcccccaaactcatgatttatgaggtcagtaatcggccctcaggggtttctaatcgcttctctggctccaagtctgccaacacggcctccctgaccatctctgggctccaggctgaggacgaggctgattattactgctcctcatataccagcagcagcacttatgtcttcggaagtgggaccagggtcaccgtcctag

SEQ ID NO: 171 - DNA, 360 bp, Artificial Sequence
  Description of Artificial Sequence: Synthetic polynucleotide
gaggtgcagctggtggagtctgggggaggcttggtccagcctggggggtccctgagactctcctgtgcagtctctggactctctttcggtgaccataccatgaactgggtccgccaggctccagggaagggactggagtgggttgcctacattagttctactagtagtgccatatactacgcagcctctgtggagggccgattcaccgtttccagagacgatgccaagaactcactgtatctgcaaatgaacagcctgagagccgaggacacggctgtttattactgtgcgagagaacatagtagtcattactccgtctttgactactggggccagggaaccctggtcaccgtctcctca

SEQ ID NO: 172 - DNA, 325 bp, Artificial Sequence
  Description of Artificial Sequence: Synthetic polynucleotide
gacatccagatgacccagtctccttccaccctgtctgcctctgtaggagacagagtcaccatcacttgtcgggccagtcagagtattagtcgctggttggcctggtatcagcagaaaccagggaaagcccctaagctcctgatctataaggcgtctactttagaaagtggggtcccatcaaggttcagcggcagtggatctgggacagaattcactctcaccatcagcagcctgcagcctgatgattttgcaacttattactgccagcagtttaatactttttccgcgctcactttcggcggagggaccaaggtggaaatcaaac

SEQ ID NO: 173 - DNA, 360 bp, Artificial Sequence
  Description of Artificial Sequence: Synthetic polynucleotide
gaggtgcagctgttggagtctgggggaggcctggtcaagcctggggggtccctgagactctcctgtgaagcctctggattcaccttcagttattataacatgaactgggtccgccaggctccagggagggggctggagtgggtctcctctattagtgatagtagtagttatacatactacacagagtcactgaagggccgattcaccatctccagagacaacgccaagaactccctgtatctgcaaatgaacagcctaagggtcgaggacacggctgtttattactgtgcgagagatgtcgcggctcgttacgcttactttgacttgtggggccagggaaccctggtcaccgtctcctca

SEQ ID NO: 174 - DNA, 325 bp, Artificial Sequence
  Description of Artificial Sequence: Synthetic polynucleotide
gacatccagatgacccagtctccttccaccctgtctgcatctgtcggagacagagtcaccatcacttgccgggccagtcagagtattagtagctggttggcctggtatcagcagaaaccagggaaagcccctaagctcctgatctataaggcgtctaatttagaaagtggggtcccatcaaggttcagcggcagtggatctgggacagaattcactctcaccatcagcagcctgcagcctgatgattttgcaacttattactgccaacagtataacactttttctgcgctcactttcggcggagggaccaaggtggagatcaaac

SEQ ID NO: 175 - DNA, 360 bp, Artificial Sequence
  Description of Artificial Sequence: Synthetic polynucleotide
gaggtgcagctgttggagtctgggggaggcctggtcaagcctggggggtccctgagactctcctgtgcagcctctggactcaccttcactgcctatagaatgaattgggtccgccaggctccagggaaggggctggagtggctctcatcaattagtaatacaaatggcgacatatactatgcagactcagtgaagggccgattcaccatctccagagacaacgccaagaattctctgtatctgcaaatgaacagcctgagggccgacgacacggctgtatattactgtgcgagagatgttgcatctaactacgcttactttgacctttggggccagggaaccctggtcaccgtctcctca

SEQ ID NO: 176 - DNA, 325 bp, Artificial Sequence
  Description of Artificial Sequence: Synthetic polynucleotide
gacatccagatgacccagtctccttccaccctgtctgcatctgtaggagacagagtcaccatcacttgccgggccagtcagagtattagtacctggttggcctggtatcagcagaaaccagggaaagcccctaaactcctgatctataaggcgtctaatttacaaagtggggtcccgtcaaggttcagcggccgtggatctgggacagcgttcactctcaccatcagcagcctgcagcctgatgattttggaacttattactgccagcaatataatacttattctgcggtcactttcggcggagggaccaaggtggaaatcaaac

SEQ ID NO: 177 - DNA, 360 bp, Artificial Sequence
  Description of Artificial Sequence: Synthetic polynucleotide
caggtgcagctggtggagtctgggggaggcggggtccagcctgggaggtccctgagactctcctgtgcagcctctggattcaccttcattagctatgctttgcactgggtccgccaggctccaggcaaggggctggagtgggtggcagttatatcatatgatggaagcaataaatactacgcagactccgtgaagggccgattcaccatctccagagacaattccaagaacacgctgtatctgcaaatgaacagcctgagacctgaggacacggctgtgtattactgtgcgaggctagcgggagctactatgggcctctctgactactggggccagggaaccctggtcaccgtctcctca

SEQ ID NO: 178 - DNA, 334 bp, Artificial Sequence
  Description of Artificial Sequence: Synthetic polynucleotide
cagcttgtgctgactcaatcatcctctgcctctgcttccctgggatcctcggtcaagctcacctgcactctgagcagtgggcacagtaactacatcatcgcatggcatcagcagcagccagggaaggcccctcggtatttgatgaaccttgaaggtagtggaaactacaacaaggggagcggagttcctgatcgcttctcaggctccagctctggggctgaccgctacctctccatctccaacctccagtctgaggatgaggctgattattactgtgagacctgggccagtaacactcgggtttttggcggagggaccaagctggccgtcctag

SEQ ID NO: 179 - DNA, 360 bp, Artificial Sequence
  Description of Artificial Sequence: Synthetic polynucleotide
caggtgcagctggtggagtctgggggaggcgtggtccagcctgggaggtccctgagactctcctgtgcagcctctggattcaccttcagtagctatggcatgcactgggtccgccaggctccaggcaagggtctggagtgggcggcagttatatcatatgatggaagtgataaattctatgcagactccgtgaagggccgattcaccatctccagagacaactccaagaacacgctttttctgcaaatgaacagcctgagagctgaggactcggctatctattactgtgctaagacggcgggtaacctttttggagtggttgttatctggggccagggaaccctggtcaccgtctcctca

SEQ ID NO: 180 - DNA, 334 bp, Artificial Sequence
  Description of Artificial Sequence: Synthetic polynucleotide
cagcttgtgctgactcaatcatcctctgcctctgcttccctgggatcctcggtcaggctcacctgcactctgagtagtgggcacaagagctacatcatcgcatggcatcagcagcagccagggaaggcccctcggtacttgatgaagcttgaacctggtggaagctccaacaagggaagcggggttcctgatcgcttctcaggctccagctctggggctgaccgctacctcaccatctccaacctccagtctgaggatgaggctgattattactgtcagacctgggacattaacaccctggtgctcggcggagggaccaagctgaccgtcctag

SEQ ID NO: 181 - DNA, 373 bp, Artificial Sequence
  Description of Artificial Sequence: Synthetic polynucleotide
caggtgcagctggtggagtctgggggaggcgtggtccagcctgggaggtccctgagactctcctgtgcagcgtctggattcacgttcagtagttatggcatgcactgggtccgccaggctccaggcaaggggctggagtgggtggcagttatatggcatgatggaagtaatgactactatccagactccgtgaaggaccgattcaccatctccagagacaattccaagaacacggtgtatctgcaaatgaacagcctgagagccgaggacacggctatatattactgtgcgagagactattgtggtcgtaacggctgcatagacaactggttcgacccctggggccagggaaccctggtcaccgtctcctcag

SEQ ID NO: 182 - DNA, 322 bp, Artificial Sequence
  Description of Artificial Sequence: Synthetic polynucleotide
gaaatagtgatgacgcagtctccagccaccctgtctgtgtctccaggggaaagagccaccctctcctgcagggccagtcagagtgttagcagcaacttagcctggtaccagcagaaacctggccaggctcccaggctcctcatctatggtgcatccaccagggccactggtatccctgccaggttcagtggcagtgggtctgggacagagttcactctcaccatcaacagcctgcagtctgaagattttgcagtttattactgtcagcagtatgattactggcccctcactttcggcggagggaccaaggtggagatcaaac

SEQ ID NO: 183 - DNA, 360 bp, Artificial Sequence
  Description of Artificial Sequence: Synthetic polynucleotide
caggtgcagctggtggagtctgggggaggcgtggtccagcctgggaggtccctgagactctcctgtgtagtctctggattcacattcagcaactatggcatgcactgggtccgccaggccccaggcaaggggctggagtgggtggcagtcatatcagatgatggaagtcaaaaagaatatggagactccgtgaagggccgattcaccatctccagagacaattccaagaacacggtgtatctgcaaatggacagcctgagagctgaggacacggctctatattactgtgggaaagatcccgccaggtggatagacaattggatcgagtcctggggccagggaatcctggtcaccgtctcc

SEQ ID NO: 184 - DNA, 322 bp, Artificial Sequence
  Description of Artificial Sequence: Synthetic polynucleotide
gaaatagtgatgacgcagtctccagccaccctgtctttgtctccaggggagagagccaccctctcctgcagggccagtcagagtgttaccaccaacttagcctggtaccagcagaaacctggccaggctcccagtctcctcatctttggtgcatccaccagggccactggcgtcccagccaggttcagtggcagtgggtctgggacagagttcactctcaccatcagcagcctgcagcctgaagattttgcagtttattactgtcagcaatataataactggccgctcactttcggcggagggaccaaggtggagatcaaac

SEQ ID NO: 185 - DNA, 364 bp, Artificial Sequence
  Description of Artificial Sequence: Synthetic polynucleotide
caggtgcagctggtggagtctgggggaggcgtggtccagcctgggagatccctgagactctcatgtgcagccactggattcaccttcagtacctatgccatgcactgggtccgccaggctccaggcaaggggctggagtgggtggcagtcatttcagatgatggaagtcaggaaaactacggagactccgtgaagggccgattcaccatctccagagacaattccaagaatacgctgattctgcaaatgaacagcctgagacttgacgacacggctttatatttttgtgcgaaagatcccgccagctgggtagacaattggttcgactcctggggccagggaaccctggtcaccgtctcctcag

SEQ ID NO: 186 - DNA, 322 bp, Artificial Sequence
  Description of Artificial Sequence: Synthetic polynucleotide
gaaatagtgatgacgcagtctccacccaccctgtctctgtctccaggggaaagagccaccctctcctgcagggccagtcggagtgttggcaccaacttagcctggtaccagcagaaacctggccaggctcccaggctcctcatgtctggtgcatccaccagggccactggcatcccagacaggttcagtgccagtgggtctgggacagagttcactctcaccatcagcagcctgcagtctgaagattttgcagtttattactgtcagcagtatgactactggccgctcactttcggcggagggaccaaggtggaaatcaaac

SEQ ID NO: 187 - DNA, 346 bp, Artificial Sequence
  Description of Artificial Sequence: Synthetic polynucleotide
caggtgcagctggtgcagtctggggctgaggtgaagaagcctggggcctcagtgaaggtttcctgcaaggcctctggatacaccttcagaaattatgctatccattgggtgcgccaggcccccggacaaaggcctgagtggatgggatggatcgacgctggcagttataagacaaaatattcacagaagttccagggcagactcaccattaccagggacatatccgcgagcacggcctacatggagctgagcagcctgagatctgaggacacggctatatatttctgtgcgagaggggggtggttcgacccctggggccagggaaccctggtcaccgtctcctcag

SEQ ID NO: 188 - DNA, 323 bp, Artificial Sequence
  Description of Artificial Sequence: Synthetic polynucleotide
catccggatgacccagtctccatcctccctgtctgcatctgtaggagacagagtcaccatcacttgccaggcgagtcacgacattagcaaccaattaaattggtttcagcagaaaccagggaaagcccctaagctcctgatcctggatgcatccaatttggaagcaggggtcccatcgaggttcagtggaagtggatctgggacacattttactttcaccatcagcagcctacagcctgaagattttgctacatattactgtcaacactatgatagtctctccacgtggacgttcggccaagggaccaaggtggaaatcaaac

SEQ ID NO: 189 - DNA, 360 bp, Artificial Sequence
  Description of Artificial Sequence: Synthetic polynucleotide
caggtgcagctggtggagtctgggggaggcgtggtccagcctgggaggtccctgagactctcctgtgcagcgtctggattcaccttcagtagctatggaatgcactgggtccgccaggctccaggcaagggactggagtgggtggcacttatatggtatgatggaagtgataaatactatacagactccgtgaagggccgattcaccatttccagagacaattccaagaaaacgttgtatctgcaaatgaacagcctgagagccgaggacacggctgtgtattactgtgcgagggggacgggaaacagctatggcccctttgagtactggggccagggaaccctggtcaccgtctcctca

SEQ ID NO: 190 - DNA, 334 bp, Artificial Sequence
  Description of Artificial Sequence: Synthetic polynucleotide
cagcctgtgctgactcaatcgccctctgcctctgcctccctgggagccccggtcaagctcacctgcactctgagcagtgggcacagcaactacgtcatcgcctggcatcagcagcagccagagaggggccctcgatatttgatgaagcttaacggtgatggcagccacaataagggggacgggatccctgatcgcttctcaggctccagctctggggctgagtacttcctcaccatctccagcctccagtctgaggatgaggctgactattactgtcagacctggggcactggccgtgtggtattcggcggagggaccaagctgaccgtcctag

SEQ ID NO: 191 - DNA, 360 bp, Artificial Sequence
  Description of Artificial Sequence: Synthetic polynucleotide
caggtgcagctggtggagtctgggggaggcgtggtccagcctgggaggtccctgagactctcctgtgcagcgtctggattcagcttcggtagctatggcatgcactgggtccgccaggctccaggcaaggggctggcgtgggtggcagttatctggtatgatggaagtgataaatactatgcagactccgtgaagggccgattcaccatctccagagacaattccaagaacaccctgtatctgcaaatgaacaacctgagagccgaggacacggctgtgtattactgtgcgaggtcgaagggaaacagctatggtccatttgactactggggcccgggaaccctggtcaccgtctcctca

SEQ ID NO: 192 - DNA, 334 bp, Artificial Sequence
  Description of Artificial Sequence: Synthetic polynucleotide
cagcctgtgctgactcaatcgccctctgcctctgcctccctgggagcctcggtcaagctcacctgcactctgagcagtgggcacagcggatacgtcatcgcatggcatcagcagcacccagggaagggccctcgttacttgatggagcttaacagtgatggcagccacatcaagggggacgggatccctgatcgcttctcaggctccagttctggggctgagcgctacctcaccatctccagcctccagtctgaggatgaggctgactattactgtcagacctggggcactggcattgttcttttcggcggagggaccaagctgaccgtcctag

SEQ ID NO: 193 - DNA, 358 bp, Artificial Sequence
  Description of Artificial Sequence: Synthetic polynucleotide
caggtccagctggtacagtctggggctgaggtgaagaagcctgggtcctcggtgaaggtctcctgcaagacttccgggggcaccttcagcaactatgctatcaactgggtccgacaggcccctggacaagggcttgagtggatgggaggcatcatccctgtctttggtacaccaaactacgcacagaggttccagggcagagtcacgatttccgcggacgaatctacgagcacttcctacatggaggtgaacagcctgacatatgaggacacggccgtgtattactgtgcgagagatgggggtgcttcggctgctgaggactactggggccagggaaccctggtcaccgtctcctcag

SEQ ID NO: 194 - DNA, 320 bp, Artificial Sequence
  Description of Artificial Sequence: Synthetic polynucleotide
catccggatgacccagtctccatcctccctgtctgcatctgtaggagacagagtcaccatctcttgccgggcaagtcagagcattagcacctatttaaattggtatcagcagaaaccagggaaagcccctaagctcctgatctatggtgcatccactttggaaactgcattcccatcaaggtttagtggcagtggatctgggacagatttcactctcaccatcagcagtctgcaacctgaagattttgcaacttactactgtcaacagagcttcagaacccctcggaccttcggccaagggacacgactggagattaaac

SEQ ID NO: 195 - DNA, 358 bp, Artificial Sequence
  Description of Artificial Sequence: Synthetic polynucleotide
caggtccagctggtacagtctggggctgaggtgaagaagcctgggtcctcggtgaaggtctcctgcaaggcctctgcaggcaccttcagcacctatgctttcagctgggtgcgacaggcccctggacaaggacttgagtggatgggaacgctcatccctgtctttagtaccccatactactcacagacattgcagggcagactcacgattaccgcggaccaatccacgagcacagtctacatggaactgagcagcctgagatctgaggacacggcactttattactgtgcgagagggggaggagcagtggccggcaatgcttactggggccagggaaccctggtcaccgtctcctcag

SEQ ID NO: 196 - DNA, 325 bp, Artificial Sequence
  Description of Artificial Sequence: Synthetic polynucleotide
gacatccagatgacccagtctccttccaccctgtctgcatctgtaggagacagagtcaccatcacttgccgggccagccagagtattagtagttggttggcctggtatcagcagaaaccagggaaagcccctaagctcctgatctatgaggcgtctaatttagaaactggggtcccatcaaggttcagcggcagtggatctgggacagaattcactctcaccatcagcagcctgcagcctgatgattttgcaacttattactgccaaaagtatgatagttattcgtcgctcactttcggcggagggaccaaggtggagatcaaac

SEQ ID NO: 197 - DNA, 355 bp, Artificial Sequence
  Description of Artificial Sequence: Synthetic polynucleotide
caggtccagctggtacagtctggggctgaggtgaagaagcctgggtcctcggtgaaggtctcctgtaaggtttctggaggcagcttcaccaactatgctatcaattgggtgcgacaggcccctggacaagggtttgagtggatgggagggatcatccctttctttaaaacaccaaactacgcacagaggttccagggcagagtcacgattaccgcggacgagtccacgagcacagcctacatggagctgagtggcctgagatctgacgacacggccatgtattactgtgggagagatggggggtctggggtaccggactactggggccagggaaccctggtcaccgtctcctcag

SEQ ID NO: 198 - DNA, 322 bp, Artificial Sequence
  Description of Artificial Sequence: Synthetic polynucleotide
gacatccagttgacccagtctccatcctcactgtcggcatctgtaggagacagagtcaccatcacttgtcgggcgagtcagggcattaacaattatttagcctggtttcagcagaaaccagggaaagcccctaagtccctgatctatgaagcagccaatttgcaaagcggggtcccatcaaagttcagcggcagcggatctgggacagagttcactctcaccatcagcagcctgcagcctgaagatattgcaacttattactgccaacagtataatagttacccttggacgttcggccaagggaccaaggtggaaatcaaac

SEQ ID NO: 199 - DNA, 397 bp, Artificial Sequence
  Description of Artificial Sequence: Synthetic polynucleotide
gaggtgcagctgttggagtctgggggaggcttggtacagcctggggggtccctgagactctcctgtgcagcctctggattcacctttagtagctctgccatgagctgggtccgccaggctccagggaaggggctggagtgggtctcatctatgagtggtagtgatgataccacatacttcgcagactccgtgaagggccggttcaccatctccagagacaattccgagagcacactgtatctgcaaatgaacagcctgagagccgaggacacggccgtatactactgtgcgagattgaattattattatgatactagtggctattactctggtcctcctttctacttctactacatggacgtctggggcaaagggaccacggtcaccgtctcctcag

SEQ ID NO: 200 - DNA, 322 bp, Artificial Sequence
  Description of Artificial Sequence: Synthetic polynucleotide
gacatccagatgacccagtctccttccaccctgtctgcatttgtaggagacagagtcaccatcacttgccgggccagtcagagtattagtagctggttggcctggtatcagcagaaaccagggaaagcccctaagctcctgatctataaggcgtctagtttagaaagtggggtcccatcaaggttcagcggcagtggatctgggacagaattcactctcaccatcagcagcctgcagcctgatgattttgcaacttattactgccaacagtttattagttacccatacacttttggccaggggaccaagctggagatcaaac

SEQ ID NO: 201 - DNA, 355 bp, Artificial Sequence
  Description of Artificial Sequence: Synthetic polynucleotide
caggtccagctggtacagtctggggctgaggtgaagaagcctgggtcctcggtgaaggtctcttgcaagtcttttggaggcaccttcgacaactatgctatcacctgggtgcgacaggcccctggacaagggcttgagtggatgggaaggatcatccctttctttcgtacgccaaactacgcacagagattgcagggcagattgacgattaccgcggacgaatctacgagcacagtctttatggagttgagcaggctgagatctgaggacacggccatgtattactgtacgagagatggcggtttagggagttttgactactggggccagggaaccctggtcaccgtctcctcag

SEQ ID NO: 202 - DNA, 337 bp, Artificial Sequence
  Description of Artificial Sequence: Synthetic polynucleotide
gaaatagtgatgacgcagtctccactctccctgcccgtcacccctggagagccggcctccatctcctgcaggtctagccagagcctcgtgcatcggactggatacaactatttggattggtatctgcagaagccagggcagcctccacatctcctgatctatatgggttctaatcgggcctccggagtccctgacaggttcagtggcagtggatcaggcacagaattcacattgaagatcagcagagtggaggccgaggacgttggcatttattactgcatgcaagctctacaaactcccccgacgttcggccaagggaccaaggtggaaatcaaac

SEQ ID NO: 203 - DNA, 355 bp, Artificial Sequence
  Description of Artificial Sequence: Synthetic polynucleotide
caggtccagctggtacagtctggggctgaggtgaagaagcctgggtcctcggtgaaggtctcctgcaaggcttctggaggcaccttcagtaactatgctatcaattgggtgcgacaggccccgggacaaggacttgagtacatgggacgtatcatccctatctttggtacaccaaactacgcacagaagttccagggcagagtcacgattaccgcggacaagtccacgagcacagcctacatggaggtgagcagcctgagacctgaagacacggccgtgtattactgtgcgagagatggtggggcccacctctttgactactggggccagggaaccctggtcaccgtctcctcag

SEQ ID NO: 204 - DNA, 337 bp, Artificial Sequence
  Description of Artificial Sequence: Synthetic polynucleotide
gatgttgtgatgactcagtctccactctccctgcccgtcacccttggacagccggcctccatctcctgcaggtctagtcaaagcctcgtacacactgatggagacatctacttgaattggtttcagcagaggccgggccaatctccaaggcgcctaatttatagggtttctaaccgggactctggggtcccagacagattcagcggcagtggatcaggcactgatttcacactgagaatcagcagggtggaggctgaagatgttggagtttattactgcatgcaaggtacacactggcctccgacgttcggccaagggaccaaggtggagatcaaac

SEQ ID NO: 205 - DNA, 358 bp, Artificial Sequence
  Description of Artificial Sequence: Synthetic polynucleotide
caggtccagctggtacagtctggggctgaggtgaagaagcctgggtcctcggtgaaggtctcctgcaaggcttctggaggcaccttcagcaattatgtcatcagctgggtgcgacaggcccctggacaagggcttgagtggatgggagggatcatccctatctttggtacagcaaagtacgcacagaagttccagggcagagtcacgattaccgcggacgaatccacgagcacagcctacatggagttgagcagcctgagatctgaggacacggccgtgtatttctgtgcccgggcggggggagcagtggctggtcttgactactggggccagggaaccctggtcaccgtctcctcag

SEQ ID NO: 206 - DNA, 325 bp, Artificial Sequence
  Description of Artificial Sequence: Synthetic polynucleotide
gacatccagatgacccagtctccttccaccctgtctgcatctgtaggagacagagtcaccatcacttgccgggccagtcagagtattaatagttggttggcctggtatcagcagaaaccagggaaagcccctaagctcctgatctataaggcgtctaatttagaaggtggggtcccatcaaggttcagcggcagtggatctgggacagaattcactctcaccatcagcagcctgcagcctgatgattttgcagcttattactgccaacagtataatacttattcgggggggacgttcggccaggggaccaaggtggagatcaaac

SEQ ID NO: 207 - DNA, 372 bp, Artificial Sequence
  Description of Artificial Sequence: Synthetic polynucleotide
aggtgcagctggtggagtctgggggcgggttgatacagccgggggggtctctgagactctcctgtgcagcctctggattctccttcagttcccatagcatgaactgggtccgccaggctccagggaaggggctggagtgggtttcatacattagtagtagtagtattgacatatattatgcagactctgtgaagggccgattcgccatctccagagacaatggcaggaacacattgtatctgcaaatgaacagcctgagagccgaggacacggctgtatatttctgtgcgagagagacatacgaatctgggagtggttattatgaatacttcgactactggggccagggaaccctggtcaccgtctcctcag

SEQ ID NO: 208 - DNA, 325 bp, Artificial Sequence
  Description of Artificial Sequence: Synthetic polynucleotide
gacatccagatgacccagtctccttccaccctgtctgcttctttaggagacagagtcaccatcacttgccgggccagtcagactattagtagatggttggcctggtatcagcagaaaccagggaaagcccctaaactcctcatctatagggcgtccaatttacatagtggggtcccatcaaggttcagcggcagtggatctgggacagaattcactctcaccatcagcagcctgcagcctgatgattctgccacttattactgccaacagtataatactttttctcggctcacgttcggcggagggaccaaggtggagatcaaac

SEQ ID NO: 209 - DNA, 349 bp, Artificial Sequence
  Description of Artificial Sequence: Synthetic polynucleotide
cagctggtacagtctgggcctgacgtgaagaagcctgggacctcagtgaaggtctcctgcaaggcttctggattcatctctagtatctctgctgtgcactgggtgcgacaggctcgtggacaacgccttgagtggatgggatgggtcgtcgttgcgagtggtaacacaaactacgctcagaagttccatgaaagagtcaccattaccagggacatgtccacaagtacagtttacatggagctgagcagcctgagatccgaagacacggccgtttattactgtgcggcagggcctcgattgcggtggttcgacccctggggccaggggaccctggtcaccgtctcctcag

SEQ ID NO: 210 - DNA, 340 bp, Artificial Sequence
  Description of Artificial Sequence: Synthetic polynucleotide
gacatcgtgatgacccagtctccagactccctggctgtgtctctgggcgagagggccaccatcaactgcaagtccagccagagtgttttatacagctccagcaatatgaactacttagcttggtaccagcagaaaccaggacaccctcctaagctgctcatttactgggcatctacccgggaatccggggtccctgaccgattcagtggcggcgggtctgggacagacttcactctcaccatcagcagcctgcaggctgaagatgtggcagtttatttctgtcagcaatattatactactcctctcactttcggcggagggaccaaggtggaaatcaaac

SEQ ID NO: 211 - DNA, 370 bp, Artificial Sequence
  Description of Artificial Sequence: Synthetic polynucleotide
gaggtgcagctggtggagtctgggggaggcttggtcctgccgggggggtatctaagactctcctgtgaggcctctggattcacctttaataacttttggatgagctgggtccgccaggctcctgggaaggggctggagtgggtggccaatataaaaggagatgcaactgagagtcattatgtggactctgtgaagggccgattcaccatttccagagacaacgccaagaggtcactgcatctgcaaatgaacagcctgagagccgacgacacggccgtctattactgtgcgagagcccgcggtaggccctactggggaggtgatgcttttgatatctggggccaagggacaatggtcaccgtctcttcag

SEQ ID NO: 212 - DNA, 322 bp, Artificial Sequence
  Description of Artificial Sequence: Synthetic polynucleotide
gaaatagtgatgacgcagtctccagccaccctgtctgtgtctccaggggaaagagccaccctctcctgcagggccagtcagactgttaacagcaacttagcctggtaccagcagaaacctggccaggctcccaggctcctcatctatgatgcaaccatcagggccactggtatcccagccaggttcagtggcagtgggtctacgacagacttcactctcaccatcagcagcctacagtctgaagattttgcagtttattactgtcagcagtataataattggcctcggacgttcggccaagggaccaaggtggaaatcaaac

SEQ ID NO: 213 - DNA, 384 bp, Artificial Sequence
  Description of Artificial Sequence: Synthetic polynucleotide
  modified_base (56)..(56): a, c, t, g, unknown or other
caggtgcagctggtggagtctgggggagggttggtcaagcctggagggtccctganactctcctgtgcagcctccggattcaccttcagtgactaccagatgaactggatccgccaggctccagggaaggggctggagtggatttcatccattattggtcgtggtagcaccatatactacgcagactctgtgaagggtcgattcaccatgtccagggacaacgccaagaagtcgctgtatctgcaaatgaacagcctgagagccgaggacacggccgtgtattactgtgcgagagatttcacactgggaaatttttggagtggtttcctcaattacaattggttcgacccctggggccagggaaccctggtcaccgtctcctca

SEQ ID NO: 214 - DNA, 331 bp, Artificial Sequence
  Description of Artificial Sequence: Synthetic polynucleotide
cagtctgccctgactcagcctgcctccgtgtctgggtctcctggacagtcgatcaccatctcctgcactggaaccagcagtgacgttggtggttatagctatgtctcctggtaccaacagcacccaggcaaagcccccaaattgatgatttatgaggtcagcaatcggccctcaggggtccctgatcgcttctctggctccaagtctggcaacacggcctccctgaccatctctgggctccaggctgaggacgaggctgattattactgcagctcatatacaatcagcaacactagggtattcggcggagggaccaaggtaaccgtcctag

SEQ ID NO: 215 - DNA, 376 bp, Artificial Sequence
  Description of Artificial Sequence: Synthetic polynucleotide
caggtgcagctggtgcagtctggggctgaggtgacgaagcctggggcctcagtgaaggtctcctgcaaggcttctggatacaccttcaccacttatcatatcaactgggtgcgacaggcccctggacaggggcttgagtggatgggatgggtgaaccctaagagtggtgacacaggctatgcacataagttccagggcagagtcaccatgaccagggacacctccataactacagcctacatggagttgagtagcctgagatctgaggacacggccgtctattattgtgcgagagatggcgatttttggagtggttattatctacatagttggctcgacccctggggccagggaaccctggtcaccgtctcctcag

SEQ ID NO: 216 - DNA, 327 bp, Artificial Sequence
  Description of Artificial Sequence: Synthetic polynucleotide
cagtctgtgctgacgcagccgccctcagtgtctgcggccccaggacagaaggtcaccatctcctgctctggaagcggctccaacgttgggaatagttatgtttcctggtaccagcacctcccaggaacagcccccaaactcctcatttatgacaatgataagcgaccctcagggattcctgaccgattctctggctccaagtctggcacgtcagccatcctgggcatcaccggactccagactggggacgaggccgattatttctgcggaacctgggatagcagcctgggtactgtggtcttcggcggagggaccaggctgaccgtc

SEQ ID NO: 217 - DNA, 382 bp, Artificial Sequence
  Description of Artificial Sequence: Synthetic polynucleotide
caggtgcagctggtgcagtctggggctgaggtgaagaagcctggggcctcagtcaaggtctcctgcaaggcttctggatacaccttcaccgactactatatccactgggtgcgacaggcccctggacaagggcttgagtggatgggatggatcaaccctaccagtggtggcacaaattatgcacagaagtttcagggccgggtcaccatgaccagggagacgtccatcagcacagcctacatggagttcagcaggctgagattcgacgacacggccgtatattattgtgcgaggagtatgatttttggagtggttaggactcctacatactactacggcatggacgtctggggccaagggaccacggtcaccgtctcctcag

SEQ ID NO: 218 - DNA, 321 bp, Artificial Sequence
  Description of Artificial Sequence: Synthetic polynucleotide
aaatagtgatgacgcagtctccagccaccctgtctgtgtctccaggggaaagagccaccctctcctgcagggccagtcagagtattagcaccaacttagcctggtaccatcacaaacctgggcagcctccccggctcctcatttttggtgcgtccaccagggccactggtatcccagccaggttcagtggcagtgggtctgggacagagttcactctcaccatcagcagcctgcagtctgaagattttgcagtttattactgtcagcactattataattggctctggacgttcggccaagggaccaaggtggagatcaaac

SEQ ID NO: 219 - DNA, 379 bp, Artificial Sequence
  Description of Artificial Sequence: Synthetic polynucleotide
gaggtgcagctgttggagtctgggggaggcttggtacagcctggggagtccctgagactctcttgtgtcgcctctggattcagcttcagcgactatgccatgaactgggtccgccaggctccagggaaggggctggagtgggtctcaattattagtgataatggtgacgccacagagttcgcagactccgtgaagggccggttcaccatctccagagacaattccaagaacaccctacatctgcacatgaacagcctgagagtcgaagacacggccgtatatttctgtgcgaaatgggggttacggcgtcttggactttccggattgggcatcccacttgactactggggccagggagccctggtcaccgtctcctcag

SEQ ID NO: 220 - DNA, 323 bp, Artificial Sequence
  Description of Artificial Sequence: Synthetic polynucleotide
catccggatgacccagtctccatcctccctgtctgcatctgtaggagacagggtcaccgtcacttgccggacaagtcaggtcattggcatgtttttgaattggtatcagcacaaaccagggaaagcccctaaactcattatctatgctgcatccaatttgcatactggggtcccatcaaggttcagtggcggtggatctgggacagatttcagtctcaccatcagcagtctacaacctgaagattttgccacttattactgtcaacagagttacagtgccccctcgatcaccttcggccaagggacacgactggagattaaac

SEQ ID NO: 221 - DNA, 376 bp, Artificial Sequence
  Description of Artificial Sequence: Synthetic polynucleotide
caggtgcagctggtggagtctgggggaggcgtagtccagcctgggaggtccctgagactctcctgtgcggcgtctggatttaggttcagtagctatggcatgcactgggtccgccaggctccaggcaaggggctggagtgggtggcagttatatggtatgatggaagtaataaagagtatagagactctgtgacgggccgattcaccatctccagagacaattccaagaacacgctgtatctgcaaatggacagcctgcgagccgaggacacggctgtttatttctgtgcgagagattcctacccctttgatgaggtgggacctattaactactttgcctactggggccagggaaccctggtcaccgtctcctcag

SEQ ID NO: 222 - DNA, 316 bp, Artificial Sequence
  Description of Artificial Sequence: Synthetic polynucleotide
gaaattgtgttgacacagtctccagccaccctgtctttgtctccaggggaaagagccaccctctcctgcagggccagtcagactgttaacttagcctggtaccaacagaaacctggccaggctcccaggctcctcatctatgatgcatccaacagggccactggcatcccagccaggttcagtggcagtgggtctgggacagacttcactctcaccatcagcagcctagagcctgaagattttgcagtttattactgtcagcagcgtacccactggcctctcactttcggccctgggaccaaagtggatatcaaac

SEQ ID NO: 223 - DNA, 391 bp, Artificial Sequence
  Description of Artificial Sequence: Synthetic polynucleotide
gaggtgcagctggtggagtctgggggaggcttggtccagcctggagggtccctgagactctcctgtgcagcctctggattcgttttcagtgaccattacatggactgggtccgccaggctccagggaaggggctggagtgggttggccgcatcagaaacaaagctgcctcctacaccgcagaatacgccgcgtttgtgaaaggcagattcaccctgttaagagacgattcacagaatttactgtctctgcaaatggacaacctcgaaaccgacgacacggccgtctattactgtactcgagagggccgtgacaaatggggtccagtgacgaacttctactactacggtctggacgtctggggccaagggaccacggtcaccgtctcctcag

SEQ ID NO: 224 - DNA, 316 bp, Artificial Sequence
  Description of Artificial Sequence: Synthetic polynucleotide
gacatccagttgacccagtctccatccttcctgtctgcatctgtaggggacagagtcaccatcacttgccgggccagtcagagcattaacacttatttagcctggtatcaacaaagaccagggaaggcccctaacctcttgatctttgctgcatccactttgcaaaatggggtcccatcaaggttcagcggcagtagatctgaatctgggacagaattcactctcacaatcagcagcctgcagcctgaagattttgcttcttattactgtcaactactgtgggcgttcggccaagggaccaaggtggaaatcaaac

SEQ ID NO: 225 - DNA, 385 bp, Artificial Sequence
  Description of Artificial Sequence: Synthetic polynucleotide
caggtgcagctggtgcagtctgggactgaggtgaagaagcctggggcctcagtgaaggtctcctgcaaggcttctggatacaccttcaccggctactatatacactgggtgcgacaggcccctggccaagggcttgagtggatgggatggatcaaccctaacagtggtggcacaaactatgcacagaagtttcagggctgggtcaccatgaccagggacacgtccatcagcacagcctacatggagctgaggaggctgaaatctgacgacacggccgtgtattactgtgcgaggagtatgatttttggagtggttattaatcccaactcctactcctacggtctggacgtctggggccaagggaccacggtcaccgtctcctcag

SEQ ID NO: 226 - DNA, 322 bp, Artificial Sequence
  Description of Artificial Sequence: Synthetic polynucleotide
gaaatagtgatgacgcagtctccagccaccctgtctgtgtctccagggggaagagccaccctctcctgcagggccagtcagagtgttagcagcaacttagcctggtaccagcagaaacctgggcaggctcccaggctcctcatctatggtgcatccacccgggccactggtatcccagccaggttcagtggcagtgggtctgggacagagttctctctcaccatcagcagcctacagtctgaagattttggggtttattactgtcagcactattataactggctctggacgttcggccaagggaccaaggtggaaatcaaac

SEQ ID NO: 227 - DNA, 397 bp, Artificial Sequence
  Description of Artificial Sequence: Synthetic polynucleotide
caggtgcagctggtgcagtctggggctgaggtgaagaagcctgggtcctcggtgaaggtctcctgcaaggcttctggaggcaccttcagcaactatgctatcaactgggtgcgacaggcccctggacaagggcttgagtggatgggagggatcatccctatctctagtacagcaaactacgcacagaggttccagggcagagtcacgattagtgcggacgaatccacgaccacagtctacatggagctgagcagcctgagatctgaggacacggccgtatattcctgtgcgagagggcattactatgaaagtggtggttattatgccggcccccctttctactacttctacggtatggacgtctggggccaagggaccacggtcaccgtctcctcag

SEQ ID NO: 228 - DNA, 334 bp, Artificial Sequence
  Description of Artificial Sequence: Synthetic polynucleotide
gatattgtgatgactcagtctccactctccctgcccgtcacccctggagagccggcctccatctcctgcaggtctagtcagagcctcctgcttcataatggatacaactatttggattggtacctgcagaagccagggcagtctccacaactcctgatctatttgggttctaatcgggcctccggggtccctgacaggttcaggggcagtggatcaggcacagattttacactgaaaatcagcagagtggaggctgaggatgttggggtttattactgcatgcaagctctacaaaccctcactttcggcggagggaccaaggtggaaatcaaac

SEQ ID NO: 229 - DNA, 385 bp, Artificial Sequence
  Description of Artificial Sequence: Synthetic polynucleotide
caggtgcagctggtggagtctgggggagggctggtcaagcctggagggtccctgagactctcctgtgcagcctctggattctccttcagtgacttctacatgagttggatccgccaggctccagggaaggggctggagtgggtttcatacattagtagtggtggtactgccattttctacgcagactctgtgaagggccgattcaccatctccagggacaactccaagaagtcactgtatttgcaaatgaacagcctgagagccgaggacacggccgtgtattattgtgcgcgagatttctcacagggaaattattggagtggtttcctcaactacaattggttcgacccctggggccagggaaccctggtcaccgtctcctcag

SEQ ID NO: 230 - DNA, 331 bp, Artificial Sequence
  Description of Artificial Sequence: Synthetic polynucleotide
cagtctgccctgactcagcctgcctccgtgtctgggtctcctggacagtcgatcaccatctcctgcactggaaccaacagtgacgttggtggttatagttatgtctcctggtaccaacaacacccaggcaaagcccccaaactcatgatttatgaggtcagtaatcggccctcaggggtccctgatcgcttctctggctccaagtctggcaacacggcctccctgaccatctctgggctccgggctgaggacgaggctgattattactgcagctcatacacaagcagcaccactagggtcttcggcggagggaccaagctgaccgtcctag

SEQ ID NO: 231 - DNA, 355 bp, Artificial Sequence
  Description of Artificial Sequence: Synthetic polynucleotide
caggtgcagctggtgcagtctggggctgaggtgaagaagcctgggtcctcggtgaaggtctcctgcaaggcttctggaggcaccttcagccactatacaattaactgggtgcgacaggcccctggacaagggcttgagtggatgggatcgatcatccctgtctttcgaacgacacagtacgcaccgaagttccagggcagagtcacacttagcgcggacgaatccacgagtacggcctacatggaggtgcgcagcctgagatctgaagacacggccgtctattactgtgcgaggaactttggttccacggggggacaatattggggccagggaaccctggtcaccgtctcctcag

SEQ ID NO: 232 - DNA, 322 bp, Artificial Sequence
  Description of Artificial Sequence: Synthetic polynucleotide
gacatccagatgacccagtctccatccttcctgtctgcttctgttggagacagagtcaccatcacttgccaggcgagtcaggacattagcaactatttaaattggtatcagcagaaacctgggaaagcccctaagctcctgatctacgacgcatcaaatttggagacaggggtcccatcaaggttcagtgggagtggatctgggacacattttagtttcaccatcagcagcctgcaggctgaagatattggcacatattactgtcaacagtatgacaatgtccggctcgctttcggcggggggaccaaggtggagatcaaac

SEQ ID NO: 233 - DNA, 352 bp, Artificial Sequence
  Description of Artificial Sequence: Synthetic polynucleotide
caggtgcagctggtgcagtctggggctgaggtgaagaagcctgggtcctcggtgaaggtctcctgcaaggcttctggaggcaccttcagaaattatgctttcagttgggtgcgactggcccctggacaagggcttgagtggatgggacagatcatccctttctttggtacaccaaattacgcacagaagttccagggcagagtcacgattaccgcggacgaatccacgagcacagcctacatggagctgaccagcctgagatctgaggacacggccgtttatttctgtgcgagagatgcttttgaagaaatggcgtattggggtcagggaaccctggtcaccgtctcctcag

SEQ ID NO: 234 - DNA, 334 bp, Artificial Sequence
  Description of Artificial Sequence: Synthetic polynucleotide
gatattgtgatgacccagactccactctcctcacatgtcacccttggacagccggcctccatctcctgcaggtctagtcaaagcctcgtacacagtgatggaaacacctacttgagttggcttcaactgaggccaggccagcctccaagactcctaatttatcagatttctaaccggttctctggggtcccagacagattcagtggcagtggggcagggacagatttcacactgaaaatcagcagggtggaagctgacgatgtcggcgtttattactgcatgcaggctacacatgggaggacgttcggccaagggaccaaggtggagatcaaac

SEQ ID NO: 235 - DNA, 358 bp, Artificial Sequence
  Description of Artificial Sequence: Synthetic polynucleotide
caggtgcagctggtgcagtctggggctgaggtgaagaagcctgggtcctcggtgaaagtctcgtgcaaggcttctggaggcaccttcagtcactatgatttcagttgggtgcgacaggcccctggacaagggcttgagtggatgggaggcatcatccctgtctttcgttcagcaaattacgcacagaagtttcagggcagactcactattaccgcggacgaatccacgaccacagtctacatggagttgagtagcctgagatctgaggacacggccgtatattactgtgcgagagatggcggagcactggctgcttttgagtactggggcctgggaaccctggtcaccgtctcctcag

SEQ ID NO: 236 - DNA, 337 bp, Artificial Sequence
  Description of Artificial Sequence: Synthetic polynucleotide
gatattgtgatgacccagactccactctctctgtccgtcacccctggacagccggcctccatctcctgcaaatctagtcggagcctcctgcatagtgatggaaacacctatctgttttggtacttgcagaagccaggccagcctccacagctcctgatctatgaagtttccaaccggttctctggagtgtcagataggttcagtggcagcgggtcagggacagatttcacactgaaaatcagtcgggtggaggctgaggatgttggggtttattactgcatgcaaagtatacagcgtccccggacgttcggccaagggaccaaggtggagatcaaac

SEQ ID NO: 237 - DNA, 21 bp, Artificial Sequence
  Description of Artificial Sequence: Synthetic oligonucleotide
ggaattcgcggccgcctcagg

SEQ ID NO: 238 - DNA, 21 bp, Artificial Sequence
  Description of Artificial Sequence: Synthetic primer
ggaattcgcggccgcctcagg

SEQ ID NO: 239 - DNA, 18 bp, Artificial Sequence
  Description of Artificial Sequence: Synthetic primer
gcggctcgagttaattaa

SEQ ID NO: 240 - DNA, 2731 bp, Artificial Sequence
  Description of Artificial Sequence: Synthetic polynucleotide
ctacttggcagtacatctacgtattagtcatcgctattaccatggtgatgcggttttggcagtacatcaatgggcgtggatagcggtttgactcacggggatttccaagtctccaccccattgacgtcaatgggagtttgttttggcaccaaaatcaacgggactttccaaaatgtcgtaacaactccgccccattgacgcaaatgggcggtaggcgtgtacggtgggaggtctatataagcagagctctctggctaactagagaacccactgcttactggcttatcgaaattaatacgactcactatagggagacccaagctggctagttaagctatcaacaaggaattcgcggccgccaggctatgatgaccacttctaaaggaaaggggggcggtccccctaggcgcaagcttaaagtgaccgcaaataagtcgcgaccagcaacgagcccaatgccaaagggcttcgtgctgtcgcgcatgctggggattctttggcacgccgtgacaggcacggccagacccccagtgctgaaaatgttctggaaaacggtaccactgcgccaggcggaggctgttctgaagaagataaagagagttatcgggaacttgatgcagagccttcacatgagagggcgtcgcaggtcaggtgtggactggacttggatttttttgacgatggcgttgatgaccatggccatggcaaccaccatccaccgggacagggaaggatacatggttatgcgggccagtggaagggacgctgcaagccaggtcagggtacaaaacggaacgtgcgtcatcctggcaacagacatgggagagtggtgtgaagattcaatcacctactcttgcgtcacgattgaccaggaggaagaacccgttgacgtggactgcttctgccgaggtgttgatagggttaagttagagtatggacgctgtggaaggcaagctggatctagggggaaaaggtctgtggtcattccaacacatgcacaaaaagacatggtcgggcgaggtcatgcatggcttaaaggtgacaatattcgagatcatgtcacccgagtcgagggctggatgtggaagaacaagcttctaactgccgccattgtggccttggcttggctcatggttgatagttggatggccagagtgactgtcatcctcttggcgttgagtctagggccagtgtacgccacgaggtgcacgcatcttgagaacagagattttgtgacaggaactcaagggaccaccagagtgtccctagttttggaacttggaggctgcgtgaccatcacagctgagggcaagccatccattgatgtatggctcgaagacatttttcaggaaagcccggctgaaaccagagaatactgcctgcacgccaaattgaccaacacaaaagtggaggctcgctgtccaaccactggaccggcgacacttccggaggagcatcaggctaatatggtgtgcaagagagaccaaagcgaccgtggatggggaaaccactgtggattcttcgggaagggcagtatagtggcttgtgcaaagtttgaatgcgaggaagcaaaaaaagctgtgggccacgtctatgactccacaaagatcacgtatgttgtcaaggttgagccccacacaggggattacttggctgcaaatgagaccaattcaaacaggaaatcagcacagtttacggtggcatccgagaaagtgatcctgcggctcggcgactatggagatgtgtcgctgacgtgtaaagtggcaagtgggattgatgtcgcccaaactgtggtgatgtcactcgacagcagcaaggaccacctgccttctgcatggcaagtgcaccgtgactggtttgaggacttggcgctgccctggaaacacaaggacaaccaagattggaacagtgtggagaaacttgtggaatttggaccaccacatgctgtgaaaatggatgttttcaatctgggggaccagacggctgtgctgctcaaatcactggcaggagttccgctggccagtgtggagggccagaaataccacctgaaaagcggccatgttacttgtgatgtgggactggaaaagctgaaactgaaaggcacaacctactccatgtgtgacaaagcaaagttcaaatggaagagagttcctgtggacagcggccatgacacagtagtcatggaggtatcatacacaggaagcgacaagccatgtcggatcccggtgcgggctgtggcacatggtgtcccagcggttaatgtagccatgctcataacccccaatccaaccattgaaacaaatggtggcggattcatagaaatgcagctgccaccaggggataacatcatctatgtgggagaccttagccagcagtggtttcagaaaggcagtaccattggtagaatgtttgaaaaaacccgcaggggattggaaaggctctctgtggttggagaacatgcatgggactttggctcagtaggcggggtactgtcttctgtggggaaggcaatccacacggtgctggggggagctttcaacaccctttttggtggtgttggattcatccctaagatgctgctgggggttgctctggtctggttgggactaaatgccaggaatccaacgatgtccatgacgtttcttgctgtgggggctttgacactgatgatgacaatgggagttggggcataatagttaattaactcgagccgcggttcgaaggtaagcct

SEQ ID NO: 241 - DNA, 25 bp, Artificial Sequence
  Description of Artificial Sequence: Synthetic primer
atctacgtattagtcatcgctatta

SEQ ID NO: 242 - DNA, 21 bp, Artificial Sequence
  Description of Artificial Sequence: Synthetic primer
accgcggctcgagttaattaa

SEQ ID NO: 243 - DNA, 22 bp, Artificial Sequence
  Description of Artificial Sequence: Synthetic primer
cttgaccgacaattgcatgaag

SEQ ID NO: 244 - DNA, 45 bp, Artificial Sequence
  Description of Artificial Sequence: Synthetic primer
ctttcctttagaagtagtcaccatagcctgcttttttgtacaaac

SEQ ID NO: 245 - DNA, 45 bp, Artificial Sequence
  Description of Artificial Sequence: Synthetic oligonucleotide
gtttgtacaaaaaagcaggctatggtgactacttctaaaggaaag

SEQ ID NO: 246 - DNA, 24 bp, Artificial Sequence
  Description of Artificial Sequence: Synthetic oligonucleotide
gtttccccatcctctatcgctctg

SEQ ID NO: 247 - DNA, 24 bp, Artificial Sequence
  Description of Artificial Sequence: Synthetic oligonucleotide
cagagcgatagaggatggggaaac

SEQ ID NO: 248 - DNA, 50 bp, Artificial Sequence
  Description of Artificial Sequence: Synthetic oligonucleotide
ttcgaaccgcggctgggtcctattatgctccgactcccattgtcatcatc

SEQ ID NO: 249 - DNA, 42 bp, Artificial Sequence
  Description of Artificial Sequence: Synthetic primer
ggaattcgcggccgcctcaggatggccgggaaggccgttcta

SEQ ID NO: 250 - DNA, 47 bp, Artificial Sequence
  Description of Artificial Sequence: Synthetic primer
ccgcggctcgagttaattaactattaggctccaacccccagagtcat

SEQ ID NO: 251 - DNA, 366 bp, Artificial Sequence
  Description of Artificial Sequence: Synthetic polynucleotide
caggtgcagctgcaggagtcgggcccaggactggtgaagccttcggggaccctgtccctcacctgcgctgtctctggtggctccgtcagcagtaatgactggtggagttgggtccgccagcccccagggaaggggctggagtggatcggggaagtctttcatcgtcggatcaccaactacaacccgtccctcgagagtcgaatcaccatatcaatagacgagtccaagaaccagttctccctacaactgaagtctgtgaccgccgcggacacggccgtgtattactgtgcgagaacgggttatagtgggaccttttcccactactttgactactggggccagggaatcctggtcaccgtctcctca

SEQ ID NO: 252 - protein, 122 aa, Artificial Sequence
  Description of Artificial Sequence: Synthetic polypeptide
QVQLQESGPGLVKPSGTLSLTCAVSGGSVSSNDWWSWVRQPPGKGLEWIGEVFHRRITNYNPSLESRITISIDESKNQFSLQLKSVTAADTAVYYCARTGYSGTFSHYFDYWGQGILVTVSS

SEQ ID NO: 253 - protein, 15 aa, Artificial Sequence
  Description of Artificial Sequence: Synthetic peptide
ARTGYSGTFSHYFDY

SEQ ID NO: 254 - DNA, 325 bp, Artificial Sequence
  Description of Artificial Sequence: Synthetic polynucleotide
gacatccagatgacccagtctccatcctccctgtctgcatctgtcggagacagagtcaccatcacttgccgggcaagtcagaccattaacaggtatttaaattggtatcagcagagaccagggaaagcccctaagctcctgatctatgctgcatccactttgcaagctggggtcccatcaaggttcagtggcagtggatttgggacagatttcactctcaccatcaacagtctgcaacctgaggattatggaacgtactactgtcaacagagtttcaatacccctccgctcactttcggcggagggaccaagattgagatcaaac

SEQ ID NO: 255 - protein, 108 aa, Artificial Sequence
  Description of Artificial Sequence: Synthetic polypeptide
DIQMTQSPSSLSASVGDRVTITCRASQTINRYLNWYQQRPGKAPKLLIYAASTLQAGVPSRFSGSGFGTDFTLTINSLQPEDYGTYYCQQSFNTPPLTFGGGTKIEIK

SEQ ID NO: 256 - protein, 10 aa, Artificial Sequence
  Description of Artificial Sequence: Synthetic peptide
QQSFNTPPLT

SEQ ID NO: 257 - DNA, 355 bp, Artificial Sequence
  Description of Artificial Sequence: Synthetic polynucleotide
caggtgcagctggtgcagtctggggctgaggtgaagaagcctgggtcctcggtgaaagtctcctgcaaggcttctggaggcaccttcagcaactatgctatcagctgggtgcgacaggcccctggacaagggcttgagtggatgggagggatcatccctatctttggtacaccaaactacgcacagaagtaccagggtaaagtcacgattaccgcggacgaatccacgagcacagcctacatggaactgagcagcctgagatctgaggacacggccgtgtattactgtgcgagagattccggaacaggagactttgcctactggggccagggaaccctggtcaccgtctcctcag

SEQ ID NO: 258 - protein, 118 aa, Artificial Sequence
  Description of Artificial Sequence: Synthetic polypeptide
QVQLVQSGAEVKKPGSSVKVSCKASGGTFSNYAISWVRQAPGQGLEWMGGIIPIFGTPNYAQKYQGKVTITADESTSTAYMELSSLRSEDTAVYYCARDSGTGDFAYWGQGTLVTVSS

SEQ ID NO: 259 - protein, 11 aa, Artificial Sequence
  Description of Artificial Sequence: Synthetic peptide
ARDSGTGDFAY

SEQ ID NO: 260 - DNA, 337 bp, Artificial Sequence
  Description of Artificial Sequence: Synthetic polynucleotide
  modified_base (40)..(40): a, c, t, g, unknown or other
gatattgtgatgactcagtctccactctccctgcccgtcncccctggagagccggcctccatctcctgcaggtctagtcacagcctcctgcataggagtggatacaactatttggattggtacctgcagaagccagggcagtctccacagctcctgatctatttgggttctaatcgggcctccggggtccctgacaggttcagtggcagtggatcaggcacagattttacactgaaaatcagcagagtggaggctgaggatgttggggtttattactgcatgcaagctctacaaactccgtggacgttcggccaagggaccaaggtggaaatcaaac

SEQ ID NO: 261 - protein, 112 aa, Artificial Sequence
  Description of Artificial Sequence: Synthetic polypeptide
  MOD_RES (14)..(14): Any amino acid
DIVMTQSPLSLPVXPGEPASISCRSSHSLLHRSGYNYLDWYLQKPGQSPQLLIYLGSNRASGVPDRFSGSGSGTDFTLKISRVEAEDVGVYYCMQALQTPWTFGQGTKVEIK

SEQ ID NO: 262 - protein, 9 aa, Artificial Sequence
  Description of Artificial Sequence: Synthetic peptide
MQALQTPWT

SEQ ID NO: 263 - DNA, 396 bp, Artificial Sequence
  Description of Artificial Sequence: Synthetic polynucleotide
caggtgcagctgcaggagtcgggcccaggactggtgaagccttcggagaccctgtccctcacctgcactgtctctggtggctccgtcagcagtggtagttacagctggagctgggtccgacaacccccagggaagggactggagtacattgggtatatgtttcacagtgggcctagcaactacaacccctccctcagggggcgaggcaccatatcagtagacacgtccaagaaccagttctccctgaagttgacctctgtggccgctgcggacacggccgtctattattgtgcgagaattcgggctctcgtgagcagtatgaaagccccagatgttccctattattactactatatggatgtctggggcaaagggaccacggtcgccgtctcctca

SEQ ID NO: 264 - protein, 132 aa, Artificial Sequence
  Description of Artificial Sequence: Synthetic polypeptide
QVQLQESGPGLVKPSETLSLTCTVSGGSVSSGSYSWSWVRQPPGKGLEYIGYMFHSGPSNYNPSLRGRGTISVDTSKNQFSLKLTSVAAADTAVYYCARIRALVSSMKAPDVPYYYYYMDVWGKGTTVAVSS

SEQ ID NO: 265 - protein, 24 aa, Artificial Sequence
  Description of Artificial Sequence: Synthetic peptide
ARIRALVSSMKAPDVPYYYYYMDV

SEQ ID NO: 266 - DNA, 325 bp, Artificial Sequence
  Description of Artificial Sequence: Synthetic polynucleotide
gacatccagatgacccagtctccatcctccctgtctgcatctgtgggagacagagtcaccatcacttgccgggcaagtcagagcatttacaactatttaaattggtatcagcagaagccagggaaaccccctaagctcctgatctttgctgcatcgacctcgcaaactggggtcccatccaggttcagtggcagtggatctgggacagacttcactctcaccatcagcagtctgcaacctgaagactttgcaacttactactgtcagcagagttacagtacccctccgatgacgttcggccaagggaccaaggtggaaatcaaac

SEQ ID NO: 267 - protein, 108 aa, Artificial Sequence
  Description of Artificial Sequence: Synthetic polypeptide
DIQMTQSPSSLSASVGDRVTITCRASQSIYNYLNWYQQKPGKPPKLLIFAASTSQTGVPSRFSGSGSGTDFTLTISSLQPEDFATYYCQQSYSTPPMTFGQGTKVEIK

SEQ ID NO: 268 - protein, 10 aa, Artificial Sequence
  Description of Artificial Sequence: Synthetic peptide
QQSYSTPPMT

SEQ ID NO: 269 - DNA, 346 bp, Artificial Sequence
  Description of Artificial Sequence: Synthetic polynucleotide
caggtgcagctggtgcagtctggggctgaactgaggaagcctggggcctcagtgaaggtctcctgtaaggcttctggatacaccttcatcgactactctatacactgggtgcgacaggcccctggacaagggcttgagtggatgggatggatcaacccttacaatggtggcacaaagtttgcacagaagtttcagggcagagtcaccatgaccacggacacgtccaccaggacagcctacatggagttgaccagactgaagtctgacgacacggccatgtatttctgtgcgcgagcgggatggttcgacccctggggccagggaacccaggtcaccgtctcctcag

SEQ ID NO: 270 - protein, 115 aa, Artificial Sequence
  Description of Artificial Sequence: Synthetic polypeptide
QVQLVQSGAELRKPGASVKVSCKASGYTFIDYSIHWVRQAPGQGLEWMGWINPYNGGTKFAQKFQGRVTMTTDTSTRTAYMELTRLKSDDTAMYFCARAGWFDPWGQGTQVTVSS

SEQ ID NO: 271 - protein, 8 aa, Artificial Sequence
  Description of Artificial Sequence: Synthetic peptide
ARAGWFDP

SEQ ID NO: 272 - DNA, 320 bp, Artificial Sequence
  Description of Artificial Sequence: Synthetic polynucleotide
gacatccagatgacccagtctccatcctccctgtctgcctctgtaggagacagagtcaccatcacttgccaggcgagtcaggacattaataattatttaaattggtatcagcagaaaccagggaaagcccctaaactcctgatctacgatgcatccactttgaatacaggggtcccatcaaggttcagtggaagtggatctgggacagattttagtttcaccatcagcagcctacagcctgaagatattgcaacatattactgtcaacagtatgataaatccctttggacgttcggccaagggaccaagctggaaatcaa

SEQ ID NO: 273 - protein, 106 aa, Artificial Sequence
  Description of Artificial Sequence: Synthetic polypeptide
DIQMTQSPSSLSASVGDRVTITCQASQDINNYLNWYQQKPGKAPKLLIYDASTLNTGVPSRFSGSGSGTDFSFTISSLQPEDIATYYCQQYDKSLWTFGQGTKLEI

SEQ ID NO: 274 - protein, 9 aa, Artificial Sequence
  Description of Artificial Sequence: Synthetic peptide
QQYDKSLWT

SEQ ID NO: 275 - DNA, 355 bp, Artificial Sequence
  Description of Artificial Sequence: Synthetic polynucleotide
caggtgcagctggtgcagtctggggctgaggtgaagaagcctgggtcctcggtgaaggtctcctgcaaggcttctggaggcaccttcagcaactttgctatcagctgggtacgacaggcccctggacaagggcttgagtggatgggagagatcatccctttctttggcacagcaaaattcgcacagaaatttcagggcagagtcacaattaccgcggacgaatccacgagcacaggctacatggagctgagcaacctgagatctcacgacacggccgtatattactgtgcgagagatggtggaatggggagttttgactactggggccagggaaccctggtcaccgtctcctcag

SEQ ID NO: 276 - protein, 118 aa, Artificial Sequence
  Description of Artificial Sequence: Synthetic polypeptide
QVQLVQSGAEVKKPGSSVKVSCKASGGTFSNFAISWVRQAPGQGLEWMGEIIPFFGTAKFAQKFQGRVTITADESTSTGYMELSNLRSHDTAVYYCARDGGMGSFDYWGQGTLVTVSS

SEQ ID NO: 277 - protein, 11 aa, Artificial Sequence
  Description of Artificial Sequence: Synthetic peptide
ARDGGMGSFDY

SEQ ID NO: 278 - DNA, 337 bp, Artificial Sequence
  Description of Artificial Sequence: Synthetic polynucleotide
gatattgtgatgactcagtctccactctccctgcccgtcacccctggagagccggcctccatttcctgcaggtctagtcagagcctcctgcacagaagtggagacaactatttggattggtacctgcagaagccagggcagtctccacagctcctgatctatttgggttctaaccgggcctccggggtccctgacaggttcagtggcagtggatcaggcacagattttacattgaaaatcaccagagtggaggctgaggatgttggggtttattactgcatgcaagctctacaaactcctcgaacttttggccaggggaccaagctggagatcaaac

SEQ ID NO: 279 - protein, 112 aa, Artificial Sequence
  Description of Artificial Sequence: Synthetic polypeptide
DIVMTQSPLSLPVTPGEPASISCRSSQSLLHRSGDNYLDWYLQKPGQSPQLLIYLGSNRASGVPDRFSGSGSGTDFTLKITRVEAEDVGVYYCMQALQTPRTFGQGTKLEIK

SEQ ID NO: 280 - protein, 9 aa, Artificial Sequence
  Description of Artificial Sequence: Synthetic peptide
MQALQTPRT

SEQ ID NO: 281 - DNA, 355 bp, Artificial Sequence
  Description of Artificial Sequence: Synthetic polynucleotide
caggtgcagctggtgcagtctggggctgaggtgaagaagcctggggcctcagtgaaggtctcctgcaagacttctggatacatattcaccggccactatatgcactgggtgcgactggcccctggacaagggcttgagtggatggggtggatcaaccctaatagaggtgccacaaattacgcacagaagtttcagggcagggtcaccatgaccagggacgagtccatcaacacattttacatggaagtgagcaggctgagagctgacgactcggccgtgtatttctgtgcgagagataatagtgggagctacaatgactactggggccagggaaccctgatcaccgtctcctcag

SEQ ID NO: 282 - protein, 118 aa, Artificial Sequence
  Description of Artificial Sequence: Synthetic polypeptide
QVQLVQSGAEVKKPGASVKVSCKTSGYIFTGHYMHWVRLAPGQGLEWMGWINPNRGATNYAQKFQGRVTMTRDESINTFYMEVSRLRADDSAVYFCARDNSGSYNDYWGQGTLITVSS

SEQ ID NO: 283 - protein, 11 aa, Artificial Sequence
  Description of Artificial Sequence: Synthetic peptide
ARDNSGSYNDY

SEQ ID NO: 284 - DNA, 322 bp, Artificial Sequence
  Description of Artificial Sequence: Synthetic polynucleotide
gacatccagatgacccagtctccttccaccctgtctgcatctgtcggagacagaatcaccatcacttgccgggccagtcagaatattagaagctggttggcctggtatcagcagaagccagggaaagcccctagactcctgatctataaggcgtctaatttagagagtggggtcccatcaaggttcagcggcagtggatctgggacagaattcactctcaccatcagtagcctgcagtctgatgatattgcaacttattattgtcaacaatataatactttttcggagatcactttcggcggagggaccaaggtggagatca

SEQ ID NO: 285 - protein, 107 aa, Artificial Sequence
  Description of Artificial Sequence: Synthetic polypeptide
DIQMTQSPSTLSASVGDRITITCRASQNIRSWLAWYQQKPGKAPRLLIYKASNLESGVPSRFSGSGSGTEFTLTISSLQSDDIATYYCQQYNTFSEITFGGGTKVEI

SEQ ID NO: 286 - protein, 10 aa, Artificial Sequence
  Description of Artificial Sequence: Synthetic peptide
QQYNTFSEIT

SEQ ID NO: 287 - DNA, 408 bp, Artificial Sequence
  Description of Artificial Sequence: Synthetic polynucleotide
gaggtgcagctggtggagtctgggggaggcttggtacagccagggcggtccccgagactctcctgtataccctctggattcagccttggtgattttggtttgagttgggtccgccaggctccagggaaggggctggagtgggtaggtttcattagaagcaaagctcatggtgggacaacacaatacggcgcgtctgtgagaggcagattctccatctcaagagatgactccaaaaacatcgcctacctgcaaatgaatagcctgacaagcgacgacacagccgtgtattattgtgctagagtccaaagccgggaggcagactgcagtggcaacaggtgctacgacgtcccctacttttactactacatggacgtctggggcaaagggaccacggtcaccgtctcctca

SEQ ID NO: 288 - protein, 136 aa, Artificial Sequence
  Description of Artificial Sequence: Synthetic polypeptide
EVQLVESGGGLVQPGRSPRLSCIPSGFSLGDFGLSWVRQAPGKGLEWVGFIRSKAHGGTTQYGASVRGRFSISRDDSKNIAYLQMNSLTSDDTAVYYCARVQSREADCSGNRCYDVPYFYYYMDVWGKGTTVTVSS

SEQ ID NO: 289 - protein, 27 aa, Artificial Sequence
  Description of Artificial Sequence: Synthetic peptide
ARVQSREADCSGNRCYDVPYFYYYMDV

SEQ ID NO: 290 - DNA, 323 bp, Artificial Sequence
  Description of Artificial Sequence: Synthetic polynucleotide
gacatccagatgacccagtctccatcctccctgtctgcatctgtaggagacagagtcaccatcacttgccggacaagccagaccattagcgactatttaaattggtatcagcagaaaccagggaaagcccctaagctcctgatctatggtgcatccactttgcagagtggggtcccatcaaggttcagtggcagtggatctggggccgatttcactctcaccatcagcagtctgcaacctgaagacattgcaacttactactgtcaacagagttacagtacccctccgctcactttcggcggagggaccaaggtggagatcaa

SEQ ID NO: 291 - protein, 107 aa, Artificial Sequence
  Description of Artificial Sequence: Synthetic polypeptide
DIQMTQSPSSLSASVGDRVTITCRTSQTISDYLNWYQQKPGKAPKLLIYGASTLQSGVPSRFSGSGSGADFTLTISSLQPEDIATYYCQQSYSTPPLTFGGGTKVEI

SEQ ID NO: 292 - protein, 10 aa, Artificial Sequence
  Description of Artificial Sequence: Synthetic peptide
QQSYSTPPLT

SEQ ID NO: 293 - DNA, 396 bp, Artificial Sequence
  Description of Artificial Sequence: Synthetic polynucleotide
gaggtgcagctggtggagactggaggaggcttgatccagcctggggggtccctaagactctcctgtgcagcctctgggttcaccgtcagtagtaacttcatgagctgggtccgccaggctccagggaaggggctggaatgggtctcagttcttcatagcgatggaacaacataccacgcggtctccgtgaagggccgattcgccatctccagagacaattccaggaacacgctgtatcttcaaatgaacagcctgagaaccgaggacacggccatatattactgtgcgagagttgccagcctagaggcgaattgtggtgctgactgctcttttgtcccatactactactactacatggacgtctggggcaaagggaccacggtcaccgtctcctca

SEQ ID NO: 294 - protein, 132 aa, Artificial Sequence
  Description of Artificial Sequence: Synthetic polypeptide
EVQLVETGGGLIQPGGSLRLSCAASGFTVSSNFMSWVRQAPGKGLEWVSVLHSDGTTYHAVSVKGRFAISRDNSRNTLYLQMNSLRTEDTAIYYCARVASLEANCGADCSFVPYYYYYMDVWGKGTTVTVSS

SEQ ID NO: 295 - protein, 26 aa, Artificial Sequence
  Description of Artificial Sequence: Synthetic peptide
ARVASLEANCGADCSFVPYYYYYMDV

SEQ ID NO: 296 - DNA, 325 bp, Artificial Sequence
  Description of Artificial Sequence: Synthetic polynucleotide
gacatccagatgacccagtctccatcctccctgtctgcatctgtaggagacagagtcaccatcacttgccgggcaagtcagagcattagcaactatttaaattggtatcaacacaagcctgggaaagcccctaagctcctgatctatgctgcatccactttgcaaggtggggtcccatcaaggttcagtggcagtggatctgggacagatttcactctctccatcagcagtctgcaacctgaagatattgcaacttattactgtcaacagagttacagtacccctcccctcactttcggcggagggaccaaggtggagatcaaac

SEQ ID NO: 297 - protein, 108 aa, Artificial Sequence
  Description of Artificial Sequence: Synthetic polypeptide
DIQMTQSPSSLSASVGDRVTITCRASQSISNYLNWYQHKPGKAPKLLIYAASTLQGGVPSRFSGSGSGTDFTLSISSLQPEDIATYYCQQSYSTPPLTFGGGTKVEIK

SEQ ID NO: 298 - protein, 10 aa, Artificial Sequence
  Description of Artificial Sequence: Synthetic peptide
QQSYSTPPLT

SEQ ID NO: 299 - DNA, 382 bp, Artificial Sequence
  Description of Artificial Sequence: Synthetic polynucleotide
caggtgcagctgcaggagtcgggcccaggactggtgaagccctcacagaccctgtccctcacctgcattgtctctggtgactccatcaacagtggtgaattctattggagctggatccgccaggcccccgggaagggcctggagtggattggatacatctattacagtgggagctcttcctataacgcgtccctcaagagtcgacttaccatgtcaatagacacgtccaagaaccacttctccctgaagttgagctctgtgactgccgcagacacggccgtatattactgtgccggccaaagggtccccgatttttggagtggtttttcttcgaagacctttgagtactggggccagggaaccctggtcaccgtctcctcag

SEQ ID NO: 300 - protein, 127 aa, Artificial Sequence
  Description of Artificial Sequence: Synthetic polypeptide
QVQLQESGPGLVKPSQTLSLTCIVSGDSINSGEFYWSWIRQAPGKGLEWIGYIYYSGSSSYNASLKSRLTMSIDTSKNHFSLKLSSVTAADTAVYYCAGQRVPDFWSGFSSKTFEYWGQGTLVTVSS

SEQ ID NO: 301 - protein, 19 aa, Artificial Sequence
  Description of Artificial Sequence: Synthetic peptide
AGQRVPDFWSGFSSKTFEY

SEQ ID NO: 302 - DNA, 334 bp, Artificial Sequence
  Description of Artificial Sequence: Synthetic polynucleotide
gatattgtgatgactcagtctccactctccctgcccgtcacccctggagagccggcctccatctcctgcaggtctagtcagagcctccttcactctaatggatacaactatttggattggtatctgcagaagccagggcagtctccacagatcttgatctacttgggttctcttcgggcccccggggtccctgacaggttcagtggcagtggatcaggcacagattttacactggaaatcagtaacgtggaggctgaggatgttggggtttattactgcatgcaagctctacagactcctacttttggccaggggaccaagctggagatcaaac

SEQ ID NO: 303 - protein, 111 aa, Artificial Sequence
  Description of Artificial Sequence: Synthetic polypeptide
DIVMTQSPLSLPVTPGEPASISCRSSQSLLHSNGYNYLDWYLQKPGQSPQILIYLGSLRAPGVPDRFSGSGSGTDFTLEISNVEAEDVGVYYCMQALQTPTFGQGTKLEIK

SEQ ID NO: 304 - protein, 8 aa, Artificial Sequence
  Description of Artificial Sequence: Synthetic peptide
MQALQTPT

SEQ ID NO: 305 - DNA, 367 bp, Artificial Sequence
  Description of Artificial Sequence: Synthetic polynucleotide
caggtgcagctggtggagtctgggggaggcgtggtccagcctgggaggtccctgagactctcctgtgcaacgtctggattcaccttcagtacctatggcatgcactgggtccgccaggctccaggcaaggggctggagtgggtggcagttatatggtatgatggaagtaataaatattatgtagactccgtgaagggccgattcaccatctccagagacaattccaagaacacactgtatctgcaaatgaacagcctgagagccggggacacggctgtgtattactgtgcgagaggcggcccggattactatgcgtctgctgtttttgatatctggggccaagggacaatggtcaccgtctcttcag

SEQ ID NO: 306 - protein, 122 aa, Artificial Sequence
  Description of Artificial Sequence: Synthetic polypeptide
QVQLVESGGGVVQPGRSLRLSCATSGFTFSTYGMHWVRQAPGKGLEWVAVIWYDGSNKYYVDSVKGRFTISRDNSKNTLYLQMNSLRAGDTAVYYCARGGPDYYASAVFDIWGQGTMVTVSS

SEQ ID NO: 307 - protein, 15 aa, Artificial Sequence
  Description of Artificial Sequence: Synthetic peptide
ARGGPDYYASAVFDI

SEQ ID NO: 308 - DNA, 322 bp, Artificial Sequence
  Description of Artificial Sequence: Synthetic polynucleotide
gaaatagtgatgacgcagtctccagccaccctgtctgtgtctccaggggaaagagccaccctctcctgcagggccagtcagagtattgacatcaacttagcctggtaccaacagagacctggacaggctcccaggctcctcatctatggtgcttccaccagggccactggtatcccagccaggttcagtggcagtgggtctgggacggagttcactctcaccatcagcagcctgcagtctgaagattttgcagtttattactgtcagcgatatgattactggcctctcactttcggcggagggaccaaggtggagatcaaac

SEQ ID NO: 309 - protein, 107 aa, Artificial Sequence
  Description of Artificial Sequence: Synthetic polypeptide
EIVMTQSPATLSVSPGERATLSCRASQSIDINLAWYQQRPGQAPRLLIYGASTRATGIPARFSGSGSGTEFTLTISSLQSEDFAVYYCQRYDYWPLTFGGGTKVEIK

SEQ ID NO: 310 - protein, 9 aa, Artificial Sequence
  Description of Artificial Sequence: Synthetic peptide
QRYDYWPLT

SEQ ID NO: 311 - DNA, 379 bp, Artificial Sequence
  Description of Artificial Sequence: Synthetic polynucleotide
caggtgcagctgcaggagtcgggcccaggactggtgaagccttcggagaccctgtccctcacctgcactgtctctggtggctccatcagaaattattattggagctggatccggcagtccgccgggcagggactggagtggattgggcgtatctatagcagtgggaccaccaagtataatccctcattcaacagtcgagtcactttgtcactagacatgtcccggagtcagttgtccctgaggctgaactctgtgaccgccgcggacacggccgtctattactgtgcgagagaacttccccaaggatattgtagtagtgccagctgctacaactggttcgacccctggggccagggaaccctggtcatcgtctcctcag

SEQ ID NO: 312 - protein, 126 aa, Artificial Sequence
  Description of Artificial Sequence: Synthetic polypeptide
QVQLQESGPGLVKPSETLSLTCTVSGGSIRNYYWSWIRQSAGQGLEWIGRIYSSGTTKYNPSFNSRVTLSLDMSRSQLSLRLNSVTAADTAVYYCARELPQGYCSSASCYNWFDPWGQGTLVIVSS

SEQ ID NO: 313 - protein, 20 aa, Artificial Sequence
  Description of Artificial Sequence: Synthetic peptide
ARELPQGYCSSASCYNWFDP

SEQ ID NO: 314 - DNA, 325 bp, Artificial Sequence
  Description of Artificial Sequence: Synthetic polynucleotide
gacatccagatgacccagtctccatcctccctgtctgcatctgtaggagacagagtcaccatctcttgccgggcaagtcagagcattagtacttatttaaattggtatcagcagaaaccagggatagcccctacactcctgatttatggtgcttccagcttgcaaattggggtcccatcaaggttcagaggcagtggatctgggactgatttcactctcaccatcagtaatctgcaacctgaggattttgcaacttactattgtcaacagagttacagtgccctccgaaccaccttcggccaagggacacgactggagattaaac

SEQ ID NO: 315 - protein, 108 aa, Artificial Sequence
  Description of Artificial Sequence: Synthetic polypeptide
DIQMTQSPSSLSASVGDRVTISCRASQSISTYLNWYQQKPGIAPTLLIYGASSLQIGVPSRFRGSGSGTDFTLTISNLQPEDFATYYCQQSYSALRTTFGQGTRLEIK

SEQ ID NO: 316 - protein, 10 aa, Artificial Sequence
  Description of Artificial Sequence: Synthetic peptide
QQSYSALRTT

SEQ ID NO: 317 - DNA, 378 bp, Artificial Sequence
  Description of Artificial Sequence: Synthetic polynucleotide
caggtgcagctggtgcagtctggggctgaggtgaagaagcctgggtcctcggtgaaggtttcctgcaaggcttctggagacaccttcagcagttatgcaatcagctgggtgcgcctggcccctggacaagggcttgagtggatgggagggatcatccctatgtctgggacaactttctacgcacagaggttcgagggcagagtcacgatgaccgcggacgaattcacgaccacagcctacatggagctgagcagcctgcgatctgaggacacggccgtctattattgtgcgagagggggctacgaggtttggagtggtccccccttctacaactacatggacgtctggggcaaagggaccacggtcaccgtctcctca

SEQ ID NO: 318 - protein, 126 aa, Artificial Sequence
  Description of Artificial Sequence: Synthetic polypeptide
QVQLVQSGAEVKKPGSSVKVSCKASGDTFSSYAISWVRLAPGQGLEWMGGIIPMSGTTFYAQRFEGRVTMTADEFTTTAYMELSSLRSEDTAVYYCARGGYEVWSGPPFYNYMDVWGKGTTVTVSS

SEQ ID NO: 319 - protein, 19 aa, Artificial Sequence
  Description of Artificial Sequence: Synthetic peptide
ARGGYEVWSGPPFYNYMDV

SEQ ID NO: 320 - DNA, 322 bp, Artificial Sequence
  Description of Artificial Sequence: Synthetic polynucleotide
gacatccagatgacccagtctccatcctccctgtctgcatctgtgggagacagagtcaccatcacttgccgggcgagtcagggcatcagcaataatttagcctggtatcagcagagaccaggggaagttcctaaactcctgatctatggtgtgtctactttacattcaggggtcccatctcggttcagtggcagtggatctgggacagacttcactctcaccatcagcagcctgcagcctgaagatgttgcaacttattactgtcaaaagtataacagtgccctcatcaccttcggccaagggacacgactggagataaaac

SEQ ID NO: 321 - protein, 107 aa, Artificial Sequence
  Description of Artificial Sequence: Synthetic polypeptide
DIQMTQSPSSLSASVGDRVTITCRASQGISNNLAWYQQRPGEVPKLLIYGVSTLHSGVPSRFSGSGSGTDFTLTISSLQPEDVATYYCQKYNSALITFGQGTRLEIK

SEQ ID NO: 322 - protein, 9 aa, Artificial Sequence
  Description of Artificial Sequence: Synthetic peptide
QKYNSALIT

SEQ ID NO: 323 - DNA, 368 bp, Artificial Sequence
  Description of Artificial Sequence: Synthetic polynucleotide
gaggtgcagctgttggagtctgggggaggcttactacagcctggggggtccctgagactctcctgtgcagcctctggattttcctttaacgactatgccttgagctgggtccgccaggctccagggaagggcctggagtgggtctcaggaattagtggtagtagtagtcacacatattacgcagactccgtgaagggccgtttcaccatctccagagacaactccaagaacaccctctatttgcaaatgagtagtctgagagccgacgacacggccacatattactgtgcgaaagagaggattctgggcaccaccggctggtactactttgagtactggggccagggaaccctggtcaccgtctcctc

SEQ ID NO: 324 - protein, 122 aa, Artificial Sequence
  Description of Artificial Sequence: Synthetic polypeptide
EVQLLESGGGLLQPGGSLRLSCAASGFSFNDYALSWVRQAPGKGLEWVSGISGSSSHTYYADSVKGRFTISRDNSKNTLYLQMSSLRADDTATYYCAKERILGTTGWYYFEYWGQGTLVTVS

SEQ ID NO: 325 - protein, 16 aa, Artificial Sequence
  Description of Artificial Sequence: Synthetic peptide
AKERILGTTGWYYFEY

SEQ ID NO: 326 - DNA, 322 bp, Artificial Sequence
  Description of Artificial Sequence: Synthetic polynucleotide
gaaatagtgatgacgcagtctccagccaccctgtctgtgtctccaggggaaagagccaccctctcctgcagggccagtcagagtgttgccgccaacttagcctggtaccaacagagacctggccaggctcccagactcctcatctatgatgcatccaccagggccactggcatcccagccaggttcagtggcagtgggtctgggacagagttcactctcaccatcagcagcctgcagtctgaagattttgcagtttattactgtcagcagtctaatcacttgcctatcaccttcggccaagggacacgactggagattaaac

SEQ ID NO: 327 - protein, 107 aa, Artificial Sequence
  Description of Artificial Sequence: Synthetic polypeptide
EIVMTQSPATLSVSPGERATLSCRASQSVAANLAWYQQRPGQAPRLLIYDASTRATGIPARFSGSGSGTEFTLTISSLQSEDFAVYYCQQSNHLPITFGQGTRLEIK

SEQ ID NO: 328 - protein, 9 aa, Artificial Sequence
  Description of Artificial Sequence: Synthetic peptide
QQSNHLPIT

SEQ ID NO: 329 - DNA, 355 bp, Artificial Sequence
  Description of Artificial Sequence: Synthetic polynucleotide
caggtccagctggtgcagtctggggctgaggtgaagaagcctgggtcctcggtgaaggtctcctgcaaggcctctgggggcaacttcagaaactatgcaatcagttgggtgcgacaggcccctggacaagggcttgagtggatgggaaggatcatccctacttttggtagagcaaactacgcacagaagttccagggcagagtcacgattaccgcggacgaatccacgagcacagcctacatggagctgagtagcctgagatatgaggacgcggccgtgtattattgtgcgagagatggggggggtgggagcctcgactactggggccagggaaccctggtcaccgtctcctcag

SEQ ID NO: 330 - protein, 118 aa, Artificial Sequence
  Description of Artificial Sequence: Synthetic polypeptide
QVQLVQSGAEVKKPGSSVKVSCKASGGNFRNYAISWVRQAPGQGLEWMGRIIPTFGRANYAQKFQGRVTITADESTSTAYMELSSLRYEDAAVYYCARDGGGGSLDYWGQGTLVTVSS

SEQ ID NO: 331 - protein, 11 aa, Artificial Sequence
  Description of Artificial Sequence: Synthetic peptide
ARDGGGGSLDY

SEQ ID NO: 332 - DNA, 337 bp, Artificial Sequence
  Description of Artificial Sequence: Synthetic polynucleotide
gatattgtgatgactcagtctccactctccctgcccgtcacccctggagagccggcctccatctcctgcaggtctagtcagagcctcctgcatagagatggatacaactatttggattggtacctgcagaagccagggcagtctccacagctcctgatctatttgggttctaatcgggcctccggggtccctgacaggttcagtggcagtggatcaggcacagattttacactgaaaatcagcagagtggaggctgaggatgttggggtttattactgcatgcaagctgtacaaactcccctcactttcggcggagggaccaaggtggagatcaaac

SEQ ID NO: 333 - protein, 112 aa, Artificial Sequence
  Description of Artificial Sequence: Synthetic polypeptide
DIVMTQSPLSLPVTPGEPASISCRSSQSLLHRDGYNYLDWYLQKPGQSPQLLIYLGSNRASGVPDRFSGSGSGTDFTLKISRVEAEDVGVYYCMQAVQTPLTFGGGTKVEIK

SEQ ID NO: 334 - protein, 9 aa, Artificial Sequence
  Description of Artificial Sequence: Synthetic peptide
MQAVQTPLT

SEQ ID NO: 335 - DNA, 378 bp, Artificial Sequence
  Description of Artificial Sequence: Synthetic polynucleotide
caggtgcagctgcaggagtcgggcccaggactggtgaagccttcggagaccctgtccctcacctgcagtgtctctggtggctccatcactagtttctattggagctggatccggcagcccccagggaagggacttgagtatattgggtttatctattccagtgggaacaccaactacaacccctccctcaagagtcgagtcaccatatcagtcgacacgtccaagaaccagttctccctgaatctgaactctgtgaccgctgcggacacggccgtgtatttctgtgcgaggggaagagatttttggagtgcgcacccgccccctctcgactactacatggacgtctggggcaaagggaccacggtcaccgtctcctca

SEQ ID NO: 336 - protein, 126 aa, Artificial Sequence
  Description of Artificial Sequence: Synthetic polypeptide
QVQLQESGPGLVKPSETLSLTCSVSGGSITSFYWSWIRQPPGKGLEYIGFIYSSGNTNYNPSLKSRVTISVDTSKNQFSLNLNSVTAADTAVYFCARGRDFWSAHPPPLDYYMDVWGKGTTVTVSS

SEQ ID NO: 337 - protein, 20 aa, Artificial Sequence
  Description of Artificial Sequence: Synthetic peptide
ARGRDFWSAHPPPLDYYMDV

SEQ ID NO: 338 - DNA, 340 bp, Artificial Sequence
  Description of Artificial Sequence: Synthetic polynucleotide
  modified_base (43)..(43): a, c, t, g, unknown or other
gacatcgtgatgacccagtctccagactccctggctgtgtctntgggcgagagggccaccatcaactgcaagtccagccagagtgttttatacagctccaacaataacaactacgtagcttggtaccagcagaaaccaggacagcctcctaagctgctcatttactgggcatctgcccgggaatccggggtccctgaccgattcagtggcagcgggtctgggacagatttcactctcaccatcagcagcctgcaggctgaagatgtggcaatttattactgtcagcaatattatggtactcctcctactttcggcggagggaccaaggtggagatcaaac

SEQ ID NO: 339 - protein, 113 aa, Artificial Sequence
  Description of Artificial Sequence: Synthetic polypeptide
  MOD_RES (15)..(15): Any amino acid
DIVMTQSPDSLAVSXGERATINCKSSQSVLYSSNNNNYVAWYQQKPGQPPKLLIYWASARESGVPDRFSGSGSGTDFTLTISSLQAEDVAIYYCQQYYGTPPTFGGGTKVEIK

SEQ ID NO: 340 - protein, 9 aa, Artificial Sequence
  Description of Artificial Sequence: Synthetic peptide
QQYYGTPPT

SEQ ID NO: 341 - DNA, 408 bp, Artificial Sequence
  Description of Artificial Sequence: Synthetic polynucleotide
gaggtgcagctggtggagtctgggggaggcctggtcaagcctggggggtccctgagactctcctgtgcagcctctggattcgccttcgatacttatgacatgaattgggtccgccgggctccagggaagggactggagtgggtctcatccattagtactactagtagttataagtactacgaagactcactgaagggccgattcaccatctccagagacaacgccaggaacttactgtatctgcaaatgaacagcctgagagccgaagactcggctgtatattactgtgcgagatggtccggaatgaatgccgcgcccctgaattgtggtggtgactgtctcatcaacccctattattactactacatggacgtctggggcaaagggaccacggtcatcgtctcctca

SEQ ID NO: 342 - protein, 136 aa, Artificial Sequence
  Description of Artificial Sequence: Synthetic polypeptide
EVQLVESGGGLVKPGGSLRLSCAASGFAFDTYDMNWVRRAPGKGLEWVSSISTTSSYKYYEDSLKGRFTISRDNARNLLYLQMNSLRAEDSAVYYCARWSGMNAAPLNCGGDCLINPYYYYYMDVWGKGTTVIVSS

SEQ ID NO: 343 - protein, 29 aa, Artificial Sequence
  Description of Artificial Sequence: Synthetic peptide
ARWSGMNAAPLNCGGDCLINPYYYYYMDV

SEQ ID NO: 344 - DNA, 325 bp, Artificial Sequence
  Description of Artificial Sequence: Synthetic polynucleotide
gacatccagatgacccagtctccatcctccctgtctgcatctgtgggagacagagtcaccatcacttgccgggcaagtcagagtattagcaattatttaaattggtatcagcaaaaacccgggaaagccccgaagctcctgatctatgctgcatccagtttgcaaagtggggtcccatcaaggttcagtggcaggggatctgggacagatttcactctcaccatcagcagtcttcaacctgaagactttgcaacttactactgtcaacagagtcatactgcccctcatgggacgttcggccaaggaaccaaggtggagatcaaac

SEQ ID NO: 345 - protein, 108 aa, Artificial Sequence
  Description of Artificial Sequence: Synthetic polypeptide
DIQMTQSPSSLSASVGDRVTITCRASQSISNYLNWYQQKPGKAPKLLIYAASSLQSGVPSRFSGRGSGTDFTLTISSLQPEDFATYYCQQSHTAPHGTFGQGTKVEIK

SEQ ID NO: 346 - protein, 10 aa, Artificial Sequence
  Description of Artificial Sequence: Synthetic peptide
QQSHTAPHGT

SEQ ID NO: 347 - DNA, 352 bp, Artificial Sequence
  Description of Artificial Sequence: Synthetic polynucleotide
caggtgcagctggtgcagtctggggctgaggtgaagaagcctgggtcctcggtgaaggtctcctgcaaggcttctggaggcagtttcaacaattatgctatcaactgggtgcgacaggcccctggacaagggcttgagtttgtgggaagaatcgtccctgcctttggtacagcaaactacgcaaagaaattccagggcagagtcacgattatcgcggacacatccacgagcacagcatacatggagttgaagaggctgacatctgaggacacggccgtctactactgtgcgagagatagctacgaaattttggcctactggggccagggaaccctggtcaccgtctcctcag

SEQ ID NO: 348 - protein, 117 aa, Artificial Sequence
  Description of Artificial Sequence: Synthetic polypeptide
QVQLVQSGAEVKKPGSSVKVSCKASGGSFNNYAINWVRQAPGQGLEFVGRIVPAFGTANYAKKFQGRVTIIADTSTSTAYMELKRLTSEDTAVYYCARDSYEILAYWGQGTLVTVSS

SEQ ID NO: 349 - protein, 10 aa, Artificial Sequence
  Description of Artificial Sequence: Synthetic peptide
ARDSYEILAY

SEQ ID NO: 350 - DNA, 340 bp, Artificial Sequence
  Description of Artificial Sequence: Synthetic polynucleotide
gatattgtgatgacccagactccactctctctgtccgtcacaccgggacagccggcctccatctcctgcaagtctagccagagcctcctgcatcgtgacggaaagacctatttgtcttggtacctgcaaaagccaggccagcctccacagctcctgatctatgaactttccaaccgattctctggagtgccagataggttcagtggcagcgggtcagggacagatttcacactggaaatcagccgggtggaggctgacgatgttgggctttattactgcatgcaaagtataaaccttttcgaggtctctttcggcggagggaccaaggtggagatcaaac

SEQ ID NO: 351 - protein, 113 aa, Artificial Sequence
  Description of Artificial Sequence: Synthetic polypeptide
DIVMTQTPLSLSVTPGQPASISCKSSQSLLHRDGKTYLSWYLQKPGQPPQLLIYELSNRFSGVPDRFSGSGSGTDFTLEISRVEADDVGLYYCMQSINLFEVSFGGGTKVEIK

SEQ ID NO: 352 - protein, 10 aa, Artificial Sequence
  Description of Artificial Sequence: Synthetic peptide
MQSINLFEVS

SEQ ID NO: 353 - DNA, 358 bp, Artificial Sequence
  Description of Artificial Sequence: Synthetic polynucleotide
gaggtgcagctggtggagtctgggggaggcttggttcagcctggagggtccctgagactttcctgtgcagcctctggattcaccttcagtagttatgagatgaattgggtccgccaggctccagggaagggactggagtgggttgcatacattagtagtggttctacttccatatactacgcagactctgtggggggccgattcaccatctccagagacgacgccaagaacgtactatatttgcaaatgaagagcctgagagtcgaggacacggctatttattactgtgcgaggccgtttcttggttggggattttttgactcctggggccagggaaccctggtcaccgtctcctcag

SEQ ID NO: 354 - protein, 119 aa, Artificial Sequence
  Description of Artificial Sequence: Synthetic polypeptide
EVQLVESGGGLVQPGGSLRLSCAASGFTFSSYEMNWVRQAPGKGLEWVAYISSGSTSIYYADSVGGRFTISRDDAKNVLYLQMKSLRVEDTAIYYCARPFLGWGFFDSWGQGTLVTVSS

SEQ ID NO: 355 - protein, 12 aa, Artificial Sequence
  Description of Artificial Sequence: Synthetic peptide
ARPFLGWGFFDS

SEQ ID NO: 356 - DNA, 325 bp, Artificial Sequence
  Description of Artificial Sequence: Synthetic polynucleotide
gacatccagatgacccagtctccttccaccctgtctgcatctgtaggagacagagtcaccatcacttgccgggccagtgagagtattagtaggtggttggcctggtatcagcagaaaccagggaaagcccccaagctcctgatctataaggcgtctagtttagaaagtggggtcccaccaaggttcagcggcagtggatctgggacagagttcactctcaccatcagcggcctgcagcctgatgattttgcaacttattactgccaacagtataatactttttcggagatcactttcggcggggggaccaaggtggagatcaaac

SEQ ID NO: 357 - protein, 108 aa, Artificial Sequence
  Description of Artificial Sequence: Synthetic polypeptide
DIQMTQSPSTLSASVGDRVTITCRASESISRWLAWYQQKPGKAPKLLIYKASSLESGVPPRFSGSGSGTEFTLTISGLQPDDFATYYCQQYNTFSEITFGGGTKVEIK

SEQ ID NO: 358 - protein, 10 aa, Artificial Sequence
  Description of Artificial Sequence: Synthetic peptide
QQYNTFSEIT

SEQ ID NO: 359 - DNA, 369 bp, Artificial Sequence
  Description of Artificial Sequence: Synthetic polynucleotide
gaggtgcagctggtggagtctgggggaggcttggtccagccgggggggtccctgagactctcctgtgcagcctctggactcacttttagtaactattggatgagctgggtccgccaggctccagggaaggggctggagtgggtggccaacataaaggaagatggaagtgagaaatactatgtggactctgtgaagggccgattcaccatctccagagacaacgccaagaactcgctgtatctgcaaataaacagcctgagagccggggacacggctgtgtattattgtgcgagagaaggatttagtggcccttattactactacggtatggacgtctggggccaagggaccacggtcaccgtctcctca

SEQ ID NO: 360 - protein, 123 aa, Artificial Sequence
  Description of Artificial Sequence: Synthetic polypeptide
EVQLVESGGGLVQPGGSLRLSCAASGLTFSNYWMSWVRQAPGKGLEWVANIKEDGSEKYYVDSVKGRFTISRDNAKNSLYLQINSLRAGDTAVYYCAREGFSGPYYYYGMDVWGQGTTVTVSS

SEQ ID NO: 361 - protein, 16 aa, Artificial Sequence
  Description of Artificial Sequence: Synthetic peptide
AREGFSGPYYYYGMDV

SEQ ID NO: 362 - DNA, 328 bp, Artificial Sequence
  Description of Artificial Sequence: Synthetic polynucleotide
gaaattgtgttgacacagtctccagccaccctgtctttgtctccaggggaaagagccaccctctcctgcagggccagtcagagtgttagcagctacttagcctggtaccaacagaaacctggccaggctcccaggctcctcatctatgatgcatccaacagggccactggcatcccagccaggttcagtggcagtgggtctgggacagacttcactctcaccatcagcagcctggagcctgaagattttgcagtttattactgtcagcagcgtacctactggccccgagcgctcactttcggcggagggaccaaggtggagatcaaac

SEQ ID NO: 363 - protein, 109 aa, Artificial Sequence
  Description of Artificial Sequence: Synthetic polypeptide
EIVLTQSPATLSLSPGERATLSCRASQSVSSYLAWYQQKPGQAPRLLIYDASNRATGIPARFSGSGSGTDFTLTISSLEPEDFAVYYCQQRTYWPRALTFGGGTKVEIK

SEQ ID NO: 364 - protein, 11 aa, Artificial Sequence
  Description of Artificial Sequence: Synthetic peptide
QQRTYWPRALT

SEQ ID NO: 365 - DNA, 355 bp, Artificial Sequence
  Description of Artificial Sequence: Synthetic polynucleotide
caggtgcagctggtgcagtctgggactgaggtgaagaagcctgggtcctcggtgagggtctcctgtaagacttctggatatacattcagcaactttgcaatcgcctgggtgcgacaggcccctggacaaggacttgagtggatgggaggtctcatacctttctttcgtaaaccaaactacgcacagaagttccagggcagggtcacaattaccgcggacgaatccacgaggacagcctacatggacctgagtagactgacagccgatgacacggccgcctattactgtgcgagagaggggggtcttgggagctacgacttctggggccagggaaccctggtcaccgtctcctcag

SEQ ID NO: 366 - protein, 118 aa, Artificial Sequence
  Description of Artificial Sequence: Synthetic polypeptide
QVQLVQSGTEVKKPGSSVRVSCKTSGYTFSNFAIAWVRQAPGQGLEWMGGLIPFFRKPNYAQKFQGRVTITADESTRTAYMDLSRLTADDTAAYYCAREGGLGSYDFWGQGTLVTVSS

SEQ ID NO: 367 - protein, 11 aa, Artificial Sequence
  Description of Artificial Sequence: Synthetic peptide
AREGGLGSYDF

SEQ ID NO: 368 - DNA, 337 bp, Artificial Sequence
  Description of Artificial Sequence: Synthetic polynucleotide
gatattgtgatgactcagtctccactctccctgtccgtcacccctggagagccggcctccatctcctgcgggtctagtcagagcctcctgcatagagatggaaacaactatttggattggtatctgcagaagccagggcagtctccacagctcctgatctatttgggttctaatcgggcctccggggtccctgacaggttcagtggcagtggatcaggcacagatttcacactgaaaatcagcagagtggaggctgaggatgttggagtctattactgcatgcaagctctacgaactcctcggattttcggcggagggaccaaggtggagctcaaac

SEQ ID NO: 369 - protein, 112 aa, Artificial Sequence
  Description of Artificial Sequence: Synthetic polypeptide
DIVMTQSPLSLSVTPGEPASISCGSSQSLLHRDGNNYLDWYLQKPGQSPQLLIYLGSNRASGVPDRFSGSGSGTDFTLKISRVEAEDVGVYYCMQALRTPRIFGGGTKVELK

SEQ ID NO: 370 - protein, 9 aa, Artificial Sequence
  Description of Artificial Sequence: Synthetic peptide
MQALRTPRI

SEQ ID NO: 371 - DNA, 355 bp, Artificial Sequence
  Description of Artificial Sequence: Synthetic polynucleotide
caggtgcagctggtgcagtctggggctgaggtgaagaagcctgggtcctcggtgacggtctcctgcatttcttctggaggcaccttcagcaactttggtatccactggatgcgacaggcccctggacaagggcttgagtgggtgggacggatcatccctgcctttggctcagcaaactacgcacagaggttgcagggcagagtcacaattaccgcggacatatccacgaccacagtctacatgttactgaccagtctgagatctgaggacacggccgtatatttctgtgcgagagaggacggagtggggtctttcgacgactggggccagggatccctggtcaccgtctcctcag

SEQ ID NO: 372 - protein, 118 aa, Artificial Sequence
  Description of Artificial Sequence: Synthetic polypeptide
QVQLVQSGAEVKKPGSSVTVSCISSGGTFSNFGIHWMRQAPGQGLEWVGRIIPAFGSANYAQRLQGRVTITADISTTTVYMLLTSLRSEDTAVYFCAREDGVGSFDDWGQGSLVTVSS

SEQ ID NO: 373 - protein, 11 aa, Artificial Sequence
  Description of Artificial Sequence: Synthetic peptide
AREDGVGSFDD

SEQ ID NO: 374 - DNA, 334 bp, Artificial Sequence
  Description of Artificial Sequence: Synthetic polynucleotide
gatattgtgatgactcagtctccactctccctgcccgtcaccccaggagagccggcctccatctcctgcaggtctagtcagagcctcctgcatagtactggacacaactatttggattggtacctgcagaagccagggcagtctccacaactcctgatctatttgggttctaatcgggcctccggggtccctgacaggttcagtggcagtggatcaggcacacattttacactgaaaattagcagagtggaggctgaggatgttgggatttattactgcatgcaagctctccgaacccctaggacgttcggccaagggaccaaggtggaaatca

SEQ ID NO: 375 - protein, 111 aa, Artificial Sequence
  Description of Artificial Sequence: Synthetic polypeptide
DIVMTQSPLSLPVTPGEPASISCRSSQSLLHSTGHNYLDWYLQKPGQSPQLLIYLGSNRASGVPDRFSGSGSGTHFTLKISRVEAEDVGIYYCMQALRTPRTFGQGTKVEI

SEQ ID NO: 376 - protein, 9 aa, Artificial Sequence
  Description of Artificial Sequence: Synthetic peptide
MQALRTPRT

SEQ ID NO: 377 - DNA, 396 bp, Artificial Sequence
  Description of Artificial Sequence: Synthetic polynucleotide
caggtgcagctggtgcagtctggggctgaagtgaagaggcctgcgtcctcggtgaagatcgcctgcaaggcttctggaggcaccttcggcaacttcgctatcaactgggtgcgacaggcccctggactaggccttgagtgggtgggagggatcatccccatccttggtgcaagaaactacgctccgcagttccagggcagagtcacggtcaccgcggacgaatccacgggcacaatctacatggagctgaccagcctgagatctgacgacacggccatgtactactgtgcgaggggtccttattatgagagtagtggttattacgcgggtttccccttctactactactactacatggacgtctggggcaaagggaccacggtcaccgtctcctca

SEQ ID NO: 378 - protein, 132 aa, Artificial Sequence
  Description of Artificial Sequence: Synthetic polypeptide
QVQLVQSGAEVKRPASSVKIACKASGGTFGNFAINWVRQAPGLGLEWVGGIIPILGARNYAPQFQGRVTVTADESTGTIYMELTSLRSDDTAMYYCARGPYYESSGYYAGFPFYYYYYMDVWGKGTTVTVSS

SEQ ID NO: 379 - protein, 25 aa, Artificial Sequence
  Description of Artificial Sequence: Synthetic peptide
ARGPYYESSGYYAGFPFYYYYYMDV

SEQ ID NO: 380 - DNA, 340 bp, Artificial Sequence
  Description of Artificial Sequence: Synthetic polynucleotide
gacatcgtgatgacccagtctccagactccctggctgtgtctctgggcgagagggccaccatcaactgcaagtccagccagagtgttttgtccacctccgacaataagaactacttagcttggtatcagcagaaaccaggacagcctcctaagttgctcctttactgggcatctacccgggagtccggggtccctgaccgattcagtggcagcgggtctgggacagatttcactctcaccatcagcagcctgcaggctgaagatgtggcagtttattactgtcagcaatatcatactactcatcagacgttcggccaggggaccaaggtggaagtcaaac

SEQ ID NO: 381 - protein, 113 aa, Artificial Sequence
  Description of Artificial Sequence: Synthetic polypeptide
DIVMTQSPDSLAVSLGERATINCKSSQSVLSTSDNKNYLAWYQQKPGQPPKLLLYWASTRESGVPDRFSGSGSGTDFTLTISSLQAEDVAVYYCQQYHTTHQTFGQGTKVEVK

SEQ ID NO: 382 - protein, 9 aa, Artificial Sequence
  Description of Artificial Sequence: Synthetic peptide
QQYHTTHQT

SEQ ID NO: 383 - DNA, 370 bp, Artificial Sequence
  Description of Artificial Sequence: Synthetic polynucleotide
caggtgcagctggtggagtctgggggaggcgtggttcggcctgggaggtccctgagactttcctgtgtagcctctggattctccctcggtagctttgccatgaactgggtccgccaggctccaggccaggggctggagtgggtggcacttatatcatatgatgaaagtttaaaattgtatgcagattccgtgaagggccgattcaccatctccagagacatttccaagaacaccctgtatctccagatgaacagcctgagagccgaagacacggctgtgtattactgtgcgaaagaacaataccagttgctccactggacggacagctttgactcctggggccagggaaccctggtcactgtctcctcag

SEQ ID NO: 384 - protein, 123 aa, Artificial Sequence
  Description of Artificial Sequence: Synthetic polypeptide
QVQLVESGGGVVRPGRSLRLSCVASGFSLGSFAMNWVRQAPGQGLEWVALISYDESLKLYADSVKGRFTISRDISKNTLYLQMNSLRAEDTAVYYCAKEQYQLLHWTDSFDSWGQGTLVTVSS

SEQ ID NO: 385 - protein, 16 aa, Artificial Sequence
  Description of Artificial Sequence: Synthetic peptide
AKEQYQLLHWTDSFDS

SEQ ID NO: 386 - DNA, 322 bp, Artificial Sequence
  Description of Artificial Sequence: Synthetic polynucleotide
gacatccagttgacccagtctccatccttcctgtctgcatctgtaggagacagagtcaccatcacttgccgggccagtcagggcgttagtacttatttagcctggtatcagctaaaaccagggaaagcccctaaactcctggtctattctgcatccactttgttcggtggggtcccatcaaggttcagcggcagtggatctgggacagaattcactctcacaatcagcagcctgcagcctgaagattttgcaacttattcctgtcatcaacttaaaagttatccgtacacttttggccaggggaccaagctggaaatcaaac

SEQ ID NO: 387 - protein, 107 aa, Artificial Sequence
  Description of Artificial Sequence: Synthetic polypeptide
DIQLTQSPSFLSASVGDRVTITCRASQGVSTYLAWYQLKPGKAPKLLVYSASTLFGGVPSRFSGSGSGTEFTLTISSLQPEDFATYSCHQLKSYPYTFGQGTKLEIK

SEQ ID NO: 388 - protein, 9 aa, Artificial Sequence
  Description of Artificial Sequence: Synthetic peptide
HQLKSYPYT

SEQ ID NO: 389 - DNA, 379 bp, Artificial Sequence
  Description of Artificial Sequence: Synthetic polynucleotide
gaggtgcagctggtggagtctgggggaggcttggtaaagcctagagggtccctgagactctcctgtgcagcctctggattcaccttcagtagttttgaaatgaactgggtccgccaggctccagggaaggggctggaatgggttgcatacataagtagtagttctaataccatatattacgcagactctgtgaagggccgattcaccatctccagagacaactctaagaattctctctatctgcaaatgaacagcctgagagccgaggacacggctgtttattattgtgcgagaggtgggatagtttactccggggacttgcacggcgctgaatacttcgatcactggggccagggcaccctggtcaccgtctcctcag

SEQ ID NO: 390 - protein, 126 aa, Artificial Sequence
  Description of Artificial Sequence: Synthetic polypeptide
EVQLVESGGGLVKPRGSLRLSCAASGFTFSSFEMNWVRQAPGKGLEWVAYISSSSNTIYYADSVKGRFTISRDNSKNSLYLQMNSLRAEDTAVYYCARGGIVYSGDLHGAEYFDHWGQGTLVTVSS

SEQ ID NO: 391 - protein, 19 aa, Artificial Sequence
  Description of Artificial Sequence: Synthetic peptide
ARGGIVYSGDLHGAEYFDH

SEQ ID NO: 392 - DNA, 325 bp, Artificial Sequence
  Description of Artificial Sequence: Synthetic polynucleotide
gaaattgtgttgacgcagtctccaggcaccctgtctttgtctccaggtgaaagtgcctccctctcctgcagggccagtcaaaatgtttacagcgactacttagcctggtaccagcagaaacctggccgggctcccaggcttctcatttatagtgcatccaggagggtcactgacatcccacacaggttcagtggcggtggctctgggacagacttcactctcaccatcaacagactggagcctgaagattttgcagtgtattattgtcagcagtatggtacctcctcgtggacgttcggccaagggaccaaggtggaaatcaaac

SEQ ID NO: 393 - protein, 108 aa, Artificial Sequence
  Description of Artificial Sequence: Synthetic polypeptide
EIVLTQSPGTLSLSPGESASLSCRASQNVYSDYLAWYQQKPGRAPRLLIYSASRRVTDIPHRFSGGGSGTDFTLTINRLEPEDFAVYYCQQYGTSSWTFGQGTKVEIK

SEQ ID NO: 394 - protein, 9 aa, Artificial Sequence
  Description of Artificial Sequence: Synthetic peptide
QQYGTSSWT

SEQ ID NO: 395 - DNA, 392 bp, Artificial Sequence
  Description of Artificial Sequence: Synthetic polynucleotide
caggtgcagctggtggagtctgggggaggcgtggcccagcctgggaggtccctgagactctcctgtgtagcctctggattcaccttcagtacttatggcatacactgggtccgccaggctccaggcaaggggctggagtgggtggcacttatatggaatgatggaagtattaaatactatgcagactccgtgaagggccgattcaccatctccagggacaattccaagaacacgctgtatctgcaaatgcacaatctgagagccgaggacacggctgtgtattactgtgcgagatggtactttgttactagtgatgcttactcccccgacacaccctactactactactacatggacgtctggggcaaagggaccacggtcaccgtctcctc

SEQ ID NO: 396 - protein, 130 aa, Artificial Sequence
  Description of Artificial Sequence: Synthetic polypeptide
QVQLVESGGGVAQPGRSLRLSCVASGFTFSTYGIHWVRQAPGKGLEWVALIWNDGSIKYYADSVKGRFTISRDNSKNTLYLQMHNLRAEDTAVYYCARWYFVTSDAYSPDTPYYYYYMDVWGKGTTVTVS

SEQ ID NO: 397 - protein, 24 aa, Artificial Sequence
  Description of Artificial Sequence: Synthetic peptide
ARWYFVTSDAYSPDTPYYYYYMDV

SEQ ID NO: 398 - DNA, 325 bp, Artificial Sequence
  Description of Artificial Sequence: Synthetic polynucleotide
gacatccagatgacccagtctccatcctccctgtctgcatctgtaggagacagagtcaccatcacttgccgggcaagtcagagcatcagcacctatttaaattggtatcagcaaaaaccagggaaagcccctactctcctgatctatgcctcatctactttgcaaagtggggtcccatccaggttcagtggcagtggatctgggacagatttcactctcaccatcagcagtctgcaacgtgaagactttgcaacttactactgtcaacagagttacagtacccctccggggacgttcggccaagggaccaaggtggaagtcaaac

SEQ ID NO: 399 - protein, 108 aa, Artificial Sequence
  Description of Artificial Sequence: Synthetic polypeptide
DIQMTQSPSSLSASVGDRVTITCRASQSISTYLNWYQQKPGKAPTLLIYASSTLQSGVPSRFSGSGSGTDFTLTISSLQREDFATYYCQQSYSTPPGTFGQGTKVEVK

SEQ ID NO: 400 - protein, 10 aa, Artificial Sequence
  Description of Artificial Sequence: Synthetic peptide
QQSYSTPPGT

SEQ ID NO: 401 - DNA, 387 bp, Artificial Sequence
  Description of Artificial Sequence: Synthetic polynucleotide
gaggtgcagctggtggagactggaggaggcttggtccagcctggggggtccctgagactctcctgtgcagcctctggtttcaccgtcagtaacagcttcatgagctgggcccgccaggctccagggaaggggctggagtgggtctcagttgtttatgccggtggtaccacatactacgcagaccccgtgaagggccgattcaccatctccagagacaattccaagaacacgatgtatattcagatgagcggtctgagagccgaggacacggccgtatattactgtgcgagagtgggcgtacaacccgctccaggagattctcaacaaccttattattactactatatggacgtctggggcaaagggaccacggtcaccgtctcctca

SEQ ID NO: 402 - protein, 129 aa, Artificial Sequence
  Description of Artificial Sequence: Synthetic polypeptide
EVQLVETGGGLVQPGGSLRLSCAASGFTVSNSFMSWARQAPGKGLEWVSVVYAGGTTYYADPVKGRFTISRDNSKNTMYIQMSGLRAEDTAVYYCARVGVQPAPGDSQQPYYYYYMDVWGKGTTVTVSS

SEQ ID NO: 403 - protein, 23 aa, Artificial Sequence
  Description of Artificial Sequence: Synthetic peptide
ARVGVQPAPGDSQQPYYYYYMDV

SEQ ID NO: 404 - DNA, 322 bp, Artificial Sequence
  Description of Artificial Sequence: Synthetic polynucleotide
gacatccagatgacccagtctccatcctccctgtctgcatctgtaggagacagagtcaccatctcttgccgggcaagtcagggcattagcacctatctaaattggtatcagcagaaaccagggaaagcccctaagctcctgctctatgctgcatccagattgcaaagtggggtcccatcaaggttcagtggccgtggatctgggacagatttcactctcaccatcagcagtctgcaacctgatgattttgcaacttactactgtcagcagagttacagtacccctccactcactttcggcggaggaaccaaggtggagatca

SEQ ID NO: 405 - protein, 107 aa, Artificial Sequence
  Description of Artificial Sequence: Synthetic polypeptide
DIQMTQSPSSLSASVGDRVTISCRASQGISTYLNWYQQKPGKAPKLLLYAASRLQSGVPSRFSGRGSGTDFTLTISSLQPDDFATYYCQQSYSTPPLTFGGGTKVEI

SEQ ID NO: 406 - protein, 10 aa, Artificial Sequence
  Description of Artificial Sequence: Synthetic peptide
QQSYSTPPLT

SEQ ID NO: 407 - DNA, 358 bp, Artificial Sequence
  Description of Artificial Sequence: Synthetic polynucleotide
caggtgcagctggtgcagtctggggctgaggtgaagaagcctgggtcctcggtgaaggtctcctgtaaggcttctggaggcaccttcagcaactttgctatcagctgggtgcgacaggcccctggacagggacttgagtggatgggagggatcatccctttctttggtacaccaaactatgcacagaagttccagggcagagtcacagttaccgcggacgaatccacgaccacggcctacatggaattgagaagactgacatctgaggacacggccgtttattactgtgcgagagaggggggagtagcagccgaatttgagttctggggccagggaaccctggtcaccgtgtcctcag

SEQ ID NO: 408 - protein, 119 aa, Artificial Sequence
  Description of Artificial Sequence: Synthetic polypeptide
QVQLVQSGAEVKKPGSSVKVSCKASGGTFSNFAISWVRQAPGQGLEWMGGIIPFFGTPNYAQKFQGRVTVTADESTTTAYMELRRLTSEDTAVYYCAREGGVAAEFEFWGQGTLVTVSS

SEQ ID NO: 409 - protein, 12 aa, Artificial Sequence
  Description of Artificial Sequence: Synthetic peptide
AREGGVAAEFEF

SEQ ID NO: 410 - DNA, 322 bp, Artificial Sequence
  Description of Artificial Sequence: Synthetic polynucleotide
gacatccagatgacccagtctccatcctccctgtctgcatctgtaggagacagagtcgccatcacttgccgggcaagtcagaccatcactacttatttacagtggtatcagcaggaaccagggaaagcccctaagctcctgatctatgctgcatccactttgcaaagtggcgtcccatcaaggttcagtggcagtggatctgggacagatttcactctcactatcagcagtctgcaacctgaagactttgcaacttactactgtcaacagagttacagttaccctcggacgttcggccaagggaccaaggtggaaatcaaac

SEQ ID NO: 411 - protein, 107 aa, Artificial Sequence
  Description of Artificial Sequence: Synthetic polypeptide
DIQMTQSPSSLSASVGDRVAITCRASQTITTYLQWYQQEPGKAPKLLIYAASTLQSGVPSRFSGSGSGTDFTLTISSLQPEDFATYYCQQSYSYPRTFGQGTKVEIK

SEQ ID NO: 412 - protein, 9 aa, Artificial Sequence
  Description of Artificial Sequence: Synthetic peptide
QQSYSYPRT

SEQ ID NO: 413 - DNA, 356 bp, Artificial Sequence
  Description of Artificial Sequence: Synthetic polynucleotide
caggtgcagctggtgcagtctggggctgaggtgaagaagcctgggtcctcgctgaaagtctcctgcaaggcttctggatacaccttcagcaactatgaaatcacctgggtgcgacaggcccctggacaaggacttgagtggatgggagggatcatccctgtctttggcacagccaattacgcaccgaagttccagggaagagtcacgattaccgcggacgaatccacgaccacagcctacatggaggtacgaagcctgaagtctgaagacacggccgtgtattactgtgcgagagattctggtgcaacgcactcctttgacgactggggccagggaaccctggtcaccgtctcctc

SEQ ID NO: 414 - protein, 118 aa, Artificial Sequence
  Description of Artificial Sequence: Synthetic polypeptide
QVQLVQSGAEVKKPGSSLKVSCKASGYTFSNYEITWVRQAPGQGLEWMGGIIPVFGTANYAPKFQGRVTITADESTTTAYMEVRSLKSEDTAVYYCARDSGATHSFDDWGQGTLVTVS

SEQ ID NO: 415 - protein, 12 aa, Artificial Sequence
  Description of Artificial Sequence: Synthetic peptide
ARDSGATHSFDD

SEQ ID NO: 416 - DNA, 337 bp, Artificial Sequence
  Description of Artificial Sequence: Synthetic polynucleotide
gatattgtgatgactcagtctccactctccctgcccgtcacccctggagagccggcctccatctcctgcaggtctagtcagagcctcttgcatagaagcggatacatctatttggattggtacctccagaagccagggcagtctccacagctcctgatctatttgggttctagtcgggcctccggggtccctgacaggttcagtggcagtgcatcaggcacagattttacactgaaaatcagcagagtggaggctgaggatattggggtttattactgcaggcaaggtctacaaactccgtacacttttggccaggggaccaagctggagatcaaac

SEQ ID NO: 417 - protein, 112 aa, Artificial Sequence
  Description of Artificial Sequence: Synthetic polypeptide
DIVMTQSPLSLPVTPGEPASISCRSSQSLLHRSGYIYLDWYLQKPGQSPQLLIYLGSSRASGVPDRFSGSASGTDFTLKISRVEAEDIGVYYCRQGLQTPYTFGQGTKLEIK

SEQ ID NO: 418 - protein, 9 aa, Artificial Sequence
  Description of Artificial Sequence: Synthetic peptide
RQGLQTPYT

SEQ ID NO: 419 - DNA, 355 bp, Artificial Sequence
  Description of Artificial Sequence: Synthetic polynucleotide
caggtgcagctggtgcagtctggggctgagatgaagaagcctgggtcctcgttgaaggtctcctgcaaggcttctggaggcggcttcaataactatcctgtcatctgggtgcgacaggcccctggacaagggcttgagtggatgggggggatcatccctgtctttggtacacccaactacgcacagaagttcaagggcagagtcacgattaccgcggacgtatcttcaaatacagcctatgtgcacctgcgcagcctgacgactgacgacacggccgtgtattactgtgcgagaggtggagcctacggtgactacctatattggggccagggaaccctggtcgccgtctcctcag

SEQ ID NO: 420 - protein, 118 aa, Artificial Sequence
  Description of Artificial Sequence: Synthetic polypeptide
QVQLVQSGAEMKKPGSSLKVSCKASGGGFNNYPVIWVRQAPGQGLEWMGGIIPVFGTPNYAQKFKGRVTITADVSSNTAYVHLRSLTTDDTAVYYCARGGAYGDYLYWGQGTLVAVSS

SEQ ID NO: 421 - protein, 11 aa, Artificial Sequence
  Description of Artificial Sequence: Synthetic peptide
ARGGAYGDYLY

SEQ ID NO: 422 - DNA, 325 bp, Artificial Sequence
  Description of Artificial Sequence: Synthetic polynucleotide
gacatccagatgacccagtctccatcctccctgtctgcatctgtaggagacagagtcaccatcacttgccaggcgagtcaggacattagcaactatttaaattggtatcagcaggaaccaggaaaagcccctaagctcctgatctacgatgcatccaatttggaaacaggggtcccatcaaggttcagtggaggtgggtctgggacagagtttactttcaccatcagcagtctacagcctgaagatattgcaacatattactgtcaacattatgattctctgccctcggtcactttcggcggagggaccaaggtggagatcaaac

SEQ ID NO: 423 - protein, 108 aa, Artificial Sequence
  Description of Artificial Sequence: Synthetic polypeptide
DIQMTQSPSSLSASVGDRVTITCQASQDISNYLNWYQQEPGKAPKLLIYDASNLETGVPSRFSGGGSGTEFTFTISSLQPEDIATYYCQHYDSLPSVTFGGGTKVEIK

SEQ ID NO: 424 - protein, 10 aa, Artificial Sequence
  Description of Artificial Sequence: Synthetic peptide
QHYDSLPSVT

SEQ ID NO: 425 - DNA, 382 bp, Artificial Sequence
  Description of Artificial Sequence: Synthetic polynucleotide
caggtgcagctggtggagtctgggggaggcgtggtccagcctgggaggtccctgagactctcctgtgcaacctctggattcaccttcagtagctatgacgtacactgggtccgccaggctccaggcaaggggctggagtggttggcagttttttcatatgatggaagtaaaaaataccatgcagactccgtgaagggccgattcaccatctccagagacatttccaagaatatactatatctgcaaatgaacagtgtgagaactgaagacacggctgtgtattactgtgcgaaaggggccggggaccccgattattatgacagtggtagatattacagccttgagtactggggccagggaaccctggtcaccgtctcgtcag

SEQ ID NO: 426 - protein, 127 aa, Artificial Sequence
  Description of Artificial Sequence: Synthetic polypeptide
QVQLVESGGGVVQPGRSLRLSCATSGFTFSSYDVHWVRQAPGKGLEWLAVFSYDGSKKYHADSVKGRFTISRDISKNILYLQMNSVRTEDTAVYYCAKGAGDPDYYDSGRYYSLEYWGQGTLVTVSS

SEQ ID NO: 427 - protein, 20 aa, Artificial Sequence
  Description of Artificial Sequence: Synthetic peptide
AKGAGDPDYYDSGRYYSLEY

SEQ ID NO: 428 - DNA, 322 bp, Artificial Sequence
  Description of Artificial Sequence: Synthetic polynucleotide
gacatccagatgacccagtctccatcctcactgtctgcatctatcggagacagagtcaccatcacttgtcgggcgagtcagggcattaggaattatctagcctggtttcagcagcacccagggaaagcccctaagttgctgatctatgctgcatccactttgcgaagtggggtctcttcgaggttcaccggcggtggatccgggacagatttctctctcaccatcagcagcctgcagcctgaagattttgcaacttattactgccaacagtacaatgcttaccccatcaccttcggccaagggacacgactggacattaaac

SEQ ID NO: 429 - protein, 107 aa, Artificial Sequence
  Description of Artificial Sequence: Synthetic polypeptide
DIQMTQSPSSLSASIGDRVTITCRASQGIRNYLAWFQQHPGKAPKLLIYAASTLRSGVSSRFTGGGSGTDFSLTISSLQPEDFATYYCQQYNAYPITFGQGTRLDIK

SEQ ID NO: 430 - protein, 9 aa, Artificial Sequence
  Description of Artificial Sequence: Synthetic peptide
QQYNAYPIT

SEQ ID NO: 431 - DNA, 358 bp, Artificial Sequence
  Description of Artificial Sequence: Synthetic polynucleotide
caggtgcagctggtgcagtctggggctgcggtgaagaagcctgggtcctcggtgaaggtctcctgcagggcttctggagcttctggaggcgccttcagcaaccatcgtatcaactgggtgcgacaggcccctggacaagggcttcagtggatgggcgggatcatccccgtctttggtactgcaaactacgcacagaaattccagggcagagtcacgattaccgcggacgaatccacgagcacagcctacatggagctgaggagcctgaacttagaggacacggccgtatatttctgtgcgagagggacctggggattagcctactggggccagggaaccctggtctccgtctcctcag

SEQ ID NO: 432 - protein, 119 aa, Artificial Sequence
  Description of Artificial Sequence: Synthetic polypeptide
QVQLVQSGAAVKKPGSSVKVSCRASGASGGAFSNHRINWVRQAPGQGLQWMGGIIPVFGTANYAQKFQGRVTITADESTSTAYMELRSLNLEDTAVYFCARGTWGLAYWGQGTLVSVSS

SEQ ID NO: 433 - protein, 9 aa, Artificial Sequence
  Description of Artificial Sequence: Synthetic peptide
ARGTWGLAY

SEQ ID NO: 434 - DNA, 322 bp, Artificial Sequence
  Description of Artificial Sequence: Synthetic polynucleotide
gacatccagatgacccagtctccatcctccctgtctgcatctataggagacagagtcaccatcacttgccaggcgagtcaggacataaacatctatttaaattggtatcagcagaaaccagggaaagcccctaaactcctgatctacgatgcatccaatttggaaacaggggtcccatcaaggttcagtggaagtgggtctgggacagattttactttcaccatcagcagcctgcagcctgaagatattgcaacatattactgtcaacagtataataatctcctgagcaccttcggccaagggacacgactggagattaaac

SEQ ID NO: 435 - protein, 107 aa, Artificial Sequence
  Description of Artificial Sequence: Synthetic polypeptide
DIQMTQSPSSLSASIGDRVTITCQASQDINIYLNWYQQKPGKAPKLLIYDASNLETGVPSRFSGSGSGTDFTFTISSLQPEDIATYYCQQYNNLLSTFGQGTRLEIK

SEQ ID NO: 436 - protein, 9 aa, Artificial Sequence
  Description of Artificial Sequence: Synthetic peptide
QQYNNLLST

SEQ ID NO: 437 - DNA, 349 bp, Artificial Sequence
  Description of Artificial Sequence: Synthetic polynucleotide
caggtgcagctggtgcagtctggggctgaggtgaagaagcctgggtcctcggtgaaggtctcctgcaaggcttctggaggcagcttcagtaactatgctatcaactggatacgacaggcccctggacaggggcttgagtggatgggagggatcatccctctctttggtgcaccaaactacgcacagaagttccagggcagagtcgcaatttccgcggacaaatccacgagcacagcctacatggagctgagtagtctgagatccgaggacacggccgtgtattattgtgcgagagtcagttacacgtatgactattggggccagggaaccctggtcatcgtctcctcag

SEQ ID NO: 438 - protein, 116 aa, Artificial Sequence
  Description of Artificial Sequence: Synthetic polypeptide
QVQLVQSGAEVKKPGSSVKVSCKASGGSFSNYAINWIRQAPGQGLEWMGGIIPLFGAPNYAQKFQGRVAISADKSTSTAYMELSSLRSEDTAVYYCARVSYTYDYWGQGTLVIVSS

SEQ ID NO: 439 - protein, 9 aa, Artificial Sequence
  Description of Artificial Sequence: Synthetic peptide
ARVSYTYDY

SEQ ID NO: 440 - DNA, 320 bp, Artificial Sequence
  Description of Artificial Sequence: Synthetic polynucleotide
gacatccagatgacccagtctccatcctccctgtctgcatctgtaggagacagagtcaccatcacttgccaggcgagtcaggacattagcaagtatttaaattggtatcagcagaaaccagggaaagtccctaagctcctgatctacgatgcatccaatttggagacaggggtcccatcaaggttcagtggaactggatctgggacagatttcactttcaccatcagcagcctgcagcctgaggatattgcaacatattactgtcaacagcatggtagtctctccgggactttcggcggagggaccaaggtggagatcaa

SEQ ID NO: 441 - protein, 106 aa, Artificial Sequence
  Description of Artificial Sequence: Synthetic polypeptide
DIQMTQSPSSLSASVGDRVTITCQASQDISKYLNWYQQKPGKVPKLLIYDASNLETGVPSRFSGTGSGTDFTFTISSLQPEDIATYYCQQHGSLSGTFGGGTKVEI

SEQ ID NO: 442 - protein, 9 aa, Artificial Sequence
  Description of Artificial Sequence: Synthetic peptide
QQHGSLSGT

SEQ ID NO: 443 - DNA, 370 bp, Artificial Sequence
  Description of Artificial Sequence: Synthetic polynucleotide
gaggtgcagctgttggagtctgggggaggcttggtacagcctggggggtccctgagactctcctgtacagcctctggattcacctttaacaattatggcatgagctgggtccgtcaggctccagggaaggggctggagtgggtcgcagtaatcactggtagtggtgcaactacaaactatgcagactccgtgaggggccggttcaccgtctccagggacaattccaaggacactctatatctgcaaatacacagcctgcgagacgacgacacggccatgtattactgtgcgaaagataacattgtgggcagcagcagttactactactttgaatattggggccagggagccctggtcaccgtctcttcag

SEQ ID NO: 444 - protein, 123 aa, Artificial Sequence
  Description of Artificial Sequence: Synthetic polypeptide
EVQLLESGGGLVQPGGSLRLSCTASGFTFNNYGMSWVRQAPGKGLEWVAVITGSGATTNYADSVRGRFTVSRDNSKDTLYLQIHSLRDDDTAMYYCAKDNIVGSSSYYYFEYWGQGALVTVSS

SEQ ID NO: 445 - protein, 16 aa, Artificial Sequence
  Description of Artificial Sequence: Synthetic peptide
AKDNIVGSSSYYYFEY

SEQ ID NO: 446 - DNA, 322 bp, Artificial Sequence
  Description of Artificial Sequence: Synthetic polynucleotide
gaaatagtgatgacgcagtctccagccaccctgtctgtgtctccaggggaaagagccaccctctcctgcagggccagtcagaatattgccggcaacttagcctggtaccagcagaaacctggccaggctcccaggctcctcatatatgatgcatccaccagggccactggcatctcagccagattcattggcactgggtttgggacagggttcactctcaccatcaacaacctgcagtctgaagattttgcagtttattactgtcagcagtgtaatcactggcctatcaccttcggccaagggacacgactggagattaaac

SEQ ID NO: 447 - protein, 107 aa, Artificial Sequence
  Description of Artificial Sequence: Synthetic polypeptide
EIVMTQSPATLSVSPGERATLSCRASQNIAGNLAWYQQKPGQAPRLLIYDASTRATGISARFIGTGFGTGFTLTINNLQSEDFAVYYCQQCNHWPITFGQGTRLEIK

SEQ ID NO: 448 - protein, 9 aa, Artificial Sequence
  Description of Artificial Sequence: Synthetic peptide
QQCNHWPIT

SEQ ID NO: 449 - DNA, 371 bp, Artificial Sequence
  Description of Artificial Sequence: Synthetic polynucleotide
caggtgcagctgcaggagtcgggcccaggactggtgaagccttcggagaccctgtccctcacctgcactgtctctggtgcctccgtctccagtcgccgccactactggagctggatccgccaggccccagggaagaatctggagtggattgggcatatccacagcagtggggacaccaactacaagccctccctcaagagtcgagtcaccatgtcgcttgacacgtccaagaaccagttctcgttgaggctggactcggtgaccgctgcggacacggccatatattactgtgggagttcgatcgaatattggagtggcgttcccatatggattgactactggggccagggaaccctggtcaccgtctcctc

SEQ ID NO: 450 - protein, 123 aa, Artificial Sequence
  Description of Artificial Sequence: Synthetic polypeptide
QVQLQESGPGLVKPSETLSLTCTVSGASVSSRRHYWSWIRQAPGKNLEWIGHIHSSGDTNYKPSLKSRVTMSLDTSKNQFSLRLDSVTAADTAIYYCGSSIEYWSGVPIWIDYWGQGTLVTVS

SEQ ID NO: 451 - protein, 16 aa, Artificial Sequence
  Description of Artificial Sequence: Synthetic peptide
GSSIEYWSGVPIWIDY

SEQ ID NO: 452 - DNA, 322 bp, Artificial Sequence
  Description of Artificial Sequence: Synthetic polynucleotide
gaaattgtgttgacacagtctccagccaccctgtctttgtctccaggggaaagagccaccctctcctgcagggccagtcagagtgttagcagctatttagcctggtaccagctgaaacctggccaggctcccaggctcctcatctatgatgcatccaatagggccactggcatcccagccaggttcagtggcagtgggtctgggacagacttcactctcaccatcagcagcctagagcctgaagattttgcagtttattactgtcaacagcgtagccactggccgggaactttcggccctgggaccaaagtggagatcaaac

SEQ ID NO: 453 - protein, 107 aa, Artificial Sequence
  Description of Artificial Sequence: Synthetic polypeptide
EIVLTQSPATLSLSPGERATLSCRASQSVSSYLAWYQLKPGQAPRLLIYDASNRATGIPARFSGSGSGTDFTLTISSLEPEDFAVYYCQQRSHWPGTFGPGTKVEIK

SEQ ID NO: 454 - protein, 9 aa, Artificial Sequence
  Description of Artificial Sequence: Synthetic peptide
QQRSHWPGT

SEQ ID NO: 455 - DNA, 355 bp, Artificial Sequence
  Description of Artificial Sequence: Synthetic polynucleotide
caggtgcagctggtgcagtctggggctgaagtgaagaagcctgggtcctcggtgaaggtctcctgcaagacttctggaggcaccttcagcacctatactatcacctgggtgcgacaggcccctggactggggcttgagtggatgggagacatcctccctgtctttggcacaacaaactacgcacgcaatttccagggcagagtcacgattaccgcggacgactcctcgagcacagcctacatggagctgagaagcctcagatctgaggacacggccgtctattactgtgcgagagatggggggatggcttcccttgactactggggccagggaaccctggtcaccgtctcctcag

SEQ ID NO: 456 - protein, 118 aa, Artificial Sequence
  Description of Artificial Sequence: Synthetic polypeptide
QVQLVQSGAEVKKPGSSVKVSCKTSGGTFSTYTITWVRQAPGLGLEWMGDILPVFGTTNYARNFQGRVTITADDSSSTAYMELRSLRSEDTAVYYCARDGGMASLDYWGQGTLVTVSS

SEQ ID NO: 457 - protein, 11 aa, Artificial Sequence
  Description of Artificial Sequence: Synthetic peptide
ARDGGMASLDY

SEQ ID NO: 458 - DNA, 322 bp, Artificial Sequence
  Description of Artificial Sequence: Synthetic polynucleotide
gacatccagatgacccagtctccatcctccctgtctgcatctgtaggagacagagtcaccatcacttgccgggcaagtcagagcattagcagctatttaaattggtatcagcagaaaccagggaaagcccctaagctcctgatctatgctgcatccagtttgcaaagtggggtcccatcaaggttcagtggcagtggatctgggacagatttcactctcaccatcagcagtctgcaacctgaagattttgcaacttactactgtcaacagagttacagtacccctctcactttcggcggagggaccaaggtggaaatcaaac

SEQ ID NO: 459 - protein, 107 aa, Artificial Sequence [sequence omitted]

SEQ ID NO: 460 - protein, 9 aa, Artificial Sequence
  Description of Artificial Sequence: Synthetic peptide
QQSYSTPLT

SEQ ID NO: 461 - DNA, 376 bp, Artificial Sequence
  Description of Artificial Sequence: Synthetic polynucleotide
caggtgcagctggtggagtctgggggaggcgtggtccagcctgggagatcactaagactcacctgtaaagcgtctggattcaggttcagcaattatgccatgcactgggtccgccaggctccaggcaaggggctagagtgggtggcagttatatggtctgatggaagtgatgaaaactacgcagactccgtgaggggccgattcaccatctcccgagacaattccaggaatatcgtgtatttgcaaatgaatagcctgagagccgaggacacggctgtgtactactgtgcgagagacgacattgattcatctcggggagaaatcaacaactggttcgacccctggggccagggaaccctggtcaccgtctcctcag

SEQ ID NO: 462 - protein, 125 aa, Artificial Sequence
  Description of Artificial Sequence: Synthetic polypeptide
QVQLVESGGGVVQPGRSLRLTCKASGFRFSNYAMHWVRQAPGKGLEWVAVIWSDGSDENYADSVRGRFTISRDNSRNIVYLQMNSLRAEDTAVYYCARDDIDSSRGEINNWFDPWGQGTLVTVSS

SEQ ID NO: 463 - protein, 18 aa, Artificial Sequence
  Description of Artificial Sequence: Synthetic peptide
ARDDIDSSRGEINNWFDP

SEQ ID NO: 464 - DNA, 320 bp, Artificial Sequence
  Description of Artificial Sequence: Synthetic polynucleotide
gaaatagtgatgacgcagtctccagccaccctgtctgtgtctccaggggaaagagccaccctctcctgcagggccagtcggagtgttggcagtaacttagcctggtaccagcagaagcctgggcaggctcccaggctcctcatctatggtacatccaaaagggccactggtatcccagccaggttcagtggcagtgggtctgggacagagttcagtctcaccatcagcagcctgcagtctgaagatcttgcagtctattactgtcagcagtatgattactggcccctttcgttcggccaggggaccaaggtggaaatcaa

SEQ ID NO: 465 - protein, 106 aa, Artificial Sequence
  Description of Artificial Sequence: Synthetic polypeptide
EIVMTQSPATLSVSPGERATLSCRASRSVGSNLAWYQQKPGQAPRLLIYGTSKRATGIPARFSGSGSGTEFSLTISSLQSEDLAVYYCQQYDYWPLSFGQGTKVEI

SEQ ID NO: 466 - protein, 9 aa, Artificial Sequence
  Description of Artificial Sequence: Synthetic peptide
QQYDYWPLS

SEQ ID NO: 467 - DNA, 396 bp, Artificial Sequence
  Description of Artificial Sequence: Synthetic polynucleotide
caggtgcagctggtgcagtctggggctgaggtgaagaagcctgggtcctcgatgaaggtctcctgcaaggcttctggaggcaccttcagcagctatgctatcagctgggtgcgacaggcccctggacaagggcttgagtggatgggagggatcatccctatctttggtacagcaaactacgcacagaagttccagggcagagtcacgattaccgcggacgaatccacgagcacagcctacatggagctgagcagcctgagatctgaggacacggccgtgtattactgtgcgagaggggtctcagatagtagtggtaattactacgcggggttgccttactattacttctacgctgtggacgtctggggccaagggaccacggtcaccgtctcctca

SEQ ID NO: 468 - protein, 132 aa, Artificial Sequence
  Description of Artificial Sequence: Synthetic polypeptide
QVQLVQSGAEVKKPGSSMKVSCKASGGTFSSYAISWVRQAPGQGLEWMGGIIPIFGTANYAQKFQGRVTITADESTSTAYMELSSLRSEDTAVYYCARGVSDSSGNYYAGLPYYYFYAVDVWGQGTTVTVSS

SEQ ID NO: 469 - protein, 25 aa, Artificial Sequence
  Description of Artificial Sequence: Synthetic peptide
ARGVSDSSGNYYAGLPYYYFYAVDV

SEQ ID NO: 470 - DNA, 337 bp, Artificial Sequence
  Description of Artificial Sequence: Synthetic polynucleotide
gatattgtgatgactcagtctccactctccctgcccgtcacccctggagagccggcctccatctcctgcaggtctagtcagagcctcctgcattataatggaaaaaattttttggattggtacctgcagaagccagggcagtctccacacctcctgatctatttgggttctaatcgggcctccggggtccctgacaggttcagtggcagtggatcaggcacagattttacactgaatatcagcagagtggaggctgaggatgttggggtttattactgcatgcaagctgtacaaactcccccggagttcggccaagggaccaaggtggaaatcaaac

SEQ ID NO: 471 - protein, 112 aa, Artificial Sequence
  Description of Artificial Sequence: Synthetic polypeptide
DIVMTQSPLSLPVTPGEPASISCRSSQSLLHYNGKNFLDWYLQKPGQSPHLLIYLGSNRASGVPDRFSGSGSGTDFTLNISRVEAEDVGVYYCMQAVQTPPEFGQGTKVEIK

SEQ ID NO: 472 - protein, 9 aa, Artificial Sequence
  Description of Artificial Sequence: Synthetic peptide
MQAVQTPPE

SEQ ID NO: 473 - DNA, 376 bp, Artificial Sequence
  Description of Artificial Sequence: Synthetic polynucleotide
caggtgcagctggtggagtctgggggaggcgtggtcccgcctgggaggtccctgagactctcctgtgtagcgtctggattcaccttcaataattatgccatgcattggatccgccaggctccaggcaaggggctggagtgggtggcagttatatggagtgatggaagtgacaaatcctacggagactccgtgaggggccgatttatcatctccagagacaattccaagaacacggtgtatctgcaaatgaacagcctgagagccgaggacacggctgtgtactactgtgcgagagacgatacagactcatctcgaggagaaatcaacaactggttcgacccctggggccaggggaccctggtcaccgtctcctcag

SEQ ID NO: 474 - protein, 125 aa, Artificial Sequence
  Description of Artificial Sequence: Synthetic polypeptide
QVQLVESGGGVVPPGRSLRLSCVASGFTFNNYAMHWIRQAPGKGLEWVAVIWSDGSDKSYGDSVRGRFIISRDNSKNTVYLQMNSLRAEDTAVYYCARDDTDSSRGEINNWFDPWGQGTLVTVSS

SEQ ID NO: 475 - protein, 18 aa, Artificial Sequence
  Description of Artificial Sequence: Synthetic peptide
ARDDTDSSRGEINNWFDP

SEQ ID NO: 476 - DNA, 337 bp, Artificial Sequence
  Description of Artificial Sequence: Synthetic polynucleotide
gatattgtgatgacccagactccactctctctgtccgtcacccctggacagccggcctccatctcctgcaagtctagtcagagcctcctgcatagtgatggaaagacctatttgtattggtacctgcagaagccaggccagcctccacagctcctgatctatgaagtttccaaccggttctctggagtgccagataggttcagtggcagcgggtcagggacagatttcacactgaaaatcagccgggtggaggctgaggatgttggggtttattactgcatgcaaagtatacagcttcctaacacttttggccaggggaccaagctggagatcaaac

SEQ ID NO: 477 - protein, 112 aa, Artificial Sequence
  Description of Artificial Sequence: Synthetic polypeptide
DIVMTQTPLSLSVTPGQPASISCKSSQSLLHSDGKTYLYWYLQKPGQPPQLLIYEVSNRFSGVPDRFSGSGSGTDFTLKISRVEAEDVGVYYCMQSIQLPNTFGQGTKLEIK

SEQ ID NO: 478 - protein, 9 aa, Artificial Sequence
  Description of Artificial Sequence: Synthetic peptide
MQSIQLPNT

SEQ ID NO: 479 - DNA, 361 bp, Artificial Sequence
  Description of Artificial Sequence: Synthetic polynucleotide
caggtgcagctggtgcagtctggggctgaagtgaagaagcctggggcctcagtgacaatttcctgtaagacgtctggatacactttcaccgactactatatacactgggtgcgccaggcccctggacaaagacttgagtggatgggattgatcgacccaaccgttggtggtgacataagttacgcacagaaattccagggcagagtcaccatgaccagggacacgtccacgagcacagtctacatggacctcagcagcctgagatctgacgacacggccgtctattactgtgggaaatccatgactcacgtggacccaacccttgactactggggccagggaaccctggtcaccgtctcct

SEQ ID NO: 480 - protein, 120 aa, Artificial Sequence
  Description of Artificial Sequence: Synthetic polypeptide
QVQLVQSGAEVKKPGASVTISCKTSGYTFTDYYIHWVRQAPGQRLEWMGLIDPTVGGDISYAQKFQGRVTMTRDTSTSTVYMDLSSLRSDDTAVYYCGKSMTHVDPTLDYWGQGTLVTVS

SEQ ID NO: 481 - protein, 13 aa, Artificial Sequence
  Description of Artificial Sequence: Synthetic peptide
GKSMTHVDPTLDY

SEQ ID NO: 482 - DNA, 322 bp, Artificial Sequence
  Description of Artificial Sequence: Synthetic polynucleotide
gaaatagtgatgacgcagtctccagccaccctgtctgtgtctccaggggaaagagccaccctctcctgcagggccagtcggagtgttggcaacaacttagcctggtaccaacagaaacctggccaggctcccaggctcttcatctttgatgcatccaccagggccactggtatcccagccaggttcagtggcagtgggtctgggacagaattcactctcaccatcagcagcctgcagtctgaagatatagcagtttattactgtgaacagtataataactggcctccctcttttggccaggggaccaagctggagatcaaac

SEQ ID NO: 483 - protein, 107 aa, Artificial Sequence
  Description of Artificial Sequence: Synthetic polypeptide
EIVMTQSPATLSVSPGERATLSCRASRSVGNNLAWYQQKPGQAPRLFIFDASTRATGIPARFSGSGSGTEFTLTISSLQSEDIAVYYCEQYNNWPPSFGQGTKLEIK

SEQ ID NO: 484 - protein, 9 aa, Artificial Sequence
  Description of Artificial Sequence: Synthetic peptide
EQYNNWPPS

SEQ ID NO: 485 - DNA, 353 bp, Artificial Sequence
  Description of Artificial Sequence: Synthetic polynucleotide
  modified_base (263)..(263): a, c, t, g, unknown or other
caggtgcagctggtgcagtctgggcctgaggtgaagaagcctgggtcctcggtgaaggtctcctgcaaggtttctggaggcaacttcaacaactatgccatcagctgggtgcgacaggcccctggacaagggcttgagttgatgggagggatcatccctgtctttggtacacctaactacgcacagagattccagggcaaagtcacgattaccgcgcacgcatcaacgaacacagcttacatggagctgaataacctgagatntgaggacacggccatctattactgtgcgagagatgatggtttggggagttttggttactggggccagggaaccctggtcaccgtctcctc

SEQ ID NO: 486 - protein, 117 aa, Artificial Sequence
  Description of Artificial Sequence: Synthetic polypeptide
  MOD_RES (88)..(88): Any amino acid
QVQLVQSGPEVKKPGSSVKVSCKVSGGNFNNYAISWVRQAPGQGLELMGGIIPVFGTPNYAQRFQGKVTITAHASTNTAYMELNNLRXEDTAIYYCARDDGLGSFGYWGQGTLVTVS

SEQ ID NO: 487 - protein, 11 aa, Artificial Sequence
  Description of Artificial Sequence: Synthetic peptide
ARDDGLGSFGY

SEQ ID NO: 488 - DNA, 337 bp, Artificial Sequence
  Description of Artificial Sequence: Synthetic polynucleotide
  modified_base (22)..(22): a, c, t, g, unknown or other
  modified_base (25)..(25): a, c, t, g, unknown or other
gatattgtgatgactcagtctncantctccctgcccgtcacccctggagagccggcctccatctcctgcaggtctagtcagagcctcctgcataggaatggagacaactatttggattggtacctgcagaagccagggcagtctccacagctcctaatctttttgggttctaatcgggcccccggggtccctgacaggttcagtggcagtggatcaggcacagattttacactgaaaatcagcagagtggaggctgaggatgttggggtttattactgcatgcaagctctacaaactcctcagacgttcggccaagggaccaaggtggaaatcaaac

SEQ ID NO: 489 - protein, 112 aa, Artificial Sequence
  Description of Artificial Sequence: Synthetic polypeptide
  MOD_RES (8)..(9): Any amino acid
DIVMTQSXXSLPVTPGEPASISCRSSQSLLHRNGDNYLDWYLQKPGQSPQLLIFLGSNRAPGVPDRFSGSGSGTDFTLKISRVEAEDVGVYYCMQALQTPQTFGQGTKVEIK

SEQ ID NO: 490 - protein, 9 aa, Artificial Sequence
  Description of Artificial Sequence: Synthetic peptide
MQALQTPQT

SEQ ID NO: 491 - DNA, 367 bp, Artificial Sequence
  Description of Artificial Sequence: Synthetic polynucleotide
caggtgcagctgcaggagtcgggcccaggactggtgaagccttcacagaccctgtccctcacctgcactgtctctggtggctccatcagcagtgatggttactactggacctggatccgccagcacccagtgaagggcctggagtggattggatacatctattatactgggagcacctactacaacccgtccctcaagagtcgagtgaccatctcagtggacacgtctaagaaccaattctccctgaagctgacctctgtgaccgccgcggacacggccatgtattactgtgcgagagatagcggctaccccaaagagggattctttgacaactggggccagggaaccctggtcaccgtctcctcag

SEQ ID NO: 492 - protein, 122 aa, Artificial Sequence
  Description of Artificial Sequence: Synthetic polypeptide
QVQLQESGPGLVKPSQTLSLTCTVSGGSISSDGYYWTWIRQHPVKGLEWIGYIYYTGSTYYNPSLKSRVTISVDTSKNQFSLKLTSVTAADTAMYYCARDSGYPKEGFFDNWGQGTLVTVSS

SEQ ID NO: 493 - protein, 14 aa, Artificial Sequence
  Description of Artificial Sequence: Synthetic peptide
ARDSGYPKEGFFDN

SEQ ID NO: 494 - DNA, 322 bp, Artificial Sequence
  Description of Artificial Sequence: Synthetic polynucleotide
gacatccagatgacccagtctccatcctccctgtctgcatctgtaggagacagagtcaccatcacttgccgggcaagtcaaagctttgccaactatataaattggtatcaacagaagccagggcaggcccctaagctcctggtctttgctgcatccaagttgcaaagtggggtcccgtcaaggttcagtggcagtggatcggggacagatttcattctcaccatcaacagtctgcaacctgaggattttgcgacttactactgtcaacagagtaacggaatcccatacacttttggccaggggaccaagctggaggtcaaac

SEQ ID NO: 495 - protein, 107 aa, Artificial Sequence
  Description of Artificial Sequence: Synthetic polypeptide
DIQMTQSPSSLSASVGDRVTITCRASQSFANYINWYQQKPGQAPKLLVFAASKLQSGVPSRFSGSGSGTDFILTINSLQPEDFATYYCQQSNGIPYTFGQGTKLEVK

SEQ ID NO: 496 - protein, 9 aa, Artificial Sequence
  Description of Artificial Sequence: Synthetic peptide
QQSNGIPYT

SEQ ID NO: 497 - DNA, 355 bp, Artificial Sequence
  Description of Artificial Sequence: Synthetic polynucleotide
caggtgcagctggtgcagtctggggctgaggtgaagaagcctgggtcctcggtgaaggtctcctgcaaggtttctggaggcaccttcaacacctttactatcagttgggtgcgacaggcccctggacaggggcttgagtacatgggaggaatcatccctgtctttggtacaccaaactacgcacggaagtaccagggcagagtcacaattaccgcggacgggtccacgagtacggcctacatggagctgaccagcctgaggtctgaggacacggccttctattactgtgcgagagacgggggtactgggagtgctgactactggggccagggaaccctggtcaccgtctcctcag

SEQ ID NO: 498 - protein, 118 aa, Artificial Sequence
  Description of Artificial Sequence: Synthetic polypeptide
QVQLVQSGAEVKKPGSSVKVSCKVSGGTFNTFTISWVRQAPGQGLEYMGGIIPVFGTPNYARKYQGRVTITADGSTSTAYMELTSLRSEDTAFYYCARDGGTGSADYWGQGTLVTVSS

SEQ ID NO: 499 - protein, 11 aa, Artificial Sequence
  Description of Artificial Sequence: Synthetic peptide
ARDGGTGSADY

SEQ ID NO: 500 - DNA, 337 bp, Artificial Sequence
  Description of Artificial Sequence: Synthetic polynucleotide
gatattgtgatgactcagtctccagtctccctgcccgtcacccctggagagccggcctccatctcctgcaggtctagtcagagtctcctgcatagggatggaaacaactatttggattggtacctgcagaagccagggcagtctccacagctcctgatctattggggttctcatcgggcctccggggtccctgacaggttcagtggcagtggatcaggcacagattttacactgaagattaccagagtggaggctgaggatgttggggtttattactgcatgcaagctctacaaactccgtggacgttcggccaagggaccaaggtggaaatcaaac

SEQ ID NO: 501 - protein, 112 aa, Artificial Sequence
  Description of Artificial Sequence: Synthetic polypeptide
DIVMTQSPVSLPVTPGEPASISCRSSQSLLHRDGNNYLDWYLQKPGQSPQLLIYWGSHRASGVPDRFSGSGSGTDFTLKITRVEAEDVGVYYCMQALQTPWTFGQGTKVEIK

SEQ ID NO: 502 - protein, 9 aa, Artificial Sequence
  Description of Artificial Sequence: Synthetic peptide
MQALQTPWT

SEQ ID NO: 503 - DNA, 390 bp, Artificial Sequence
  Description of Artificial Sequence: Synthetic polynucleotide
gaggtgcagctggtggagactggaggaggcttgatcctgcctggggggtccctgagactctcctgtgcaatctctgggttcaccgtcagtagtcagttcatgagctgggtccgccaggctccaggaaagggactcgagtgggtctcaaatatttatagtgatggtacaacatattacgcagattccgtgaagggccgattctccatctccagagacacttccaagaacaccctatatcttcaaatgaacaccctgagagccgaggacacggccgtatattattgtgcgagagtgtctgattcgcggagtaatgcggatccgctctgggcgcccctatactactactacatggacgtctggggcaaagggaccacggtcaccgtctcctca

SEQ ID NO: 504 - protein, 130 aa, Artificial Sequence
  Description of Artificial Sequence: Synthetic polypeptide
EVQLVETGGGLILPGGSLRLSCAISGFTVSSQFMSWVRQAPGKGLEWVSNIYSDGTTYYADSVKGRFSISRDTSKNTLYLQMNTLRAEDTAVYYCARVSDSRSNADPLWAPLYYYYMDVWGKGTTVTVSS

SEQ ID NO: 505 - protein, 24 aa, Artificial Sequence
  Description of Artificial Sequence: Synthetic peptide
ARVSDSRSNADPLWAPLYYYYMDV

SEQ ID NO: 506 - DNA, 323 bp, Artificial Sequence
  Description of Artificial Sequence: Synthetic polynucleotide
gacatccagatgacccagtctccatcctccctgtctgcgtctgtaggagacagagtcaccatcacttgccggtcaagtcagagcattgacaactatttaaattggtatcagcagagagcagggaaagtccctaagctcctgatctatgctgcatccagtttgcagattggggtcccatcaaggttcagtggcagtggatctgggacagatttcactctcaccattagcaatctgcagcctgaagattttgcaacttactactgccaacagagttacagtacccccgcgctcactttcggcggagggaccaaggtggagatcaa

SEQ ID NO: 507 - protein, 107 aa, Artificial Sequence
  Description of Artificial Sequence: Synthetic polypeptide
DIQMTQSPSSLSASVGDRVTITCRSSQSIDNYLNWYQQRAGKVPKLLIYAASSLQIGVPSRFSGSGSGTDFTLTISNLQPEDFATYYCQQSYSTPALTFGGGTKVEI

SEQ ID NO: 508 - protein, 10 aa, Artificial Sequence
  Description of Artificial Sequence: Synthetic peptide
QQSYSTPALT

SEQ ID NO: 509 - DNA, 375 bp, Artificial Sequence
  Description of Artificial Sequence: Synthetic polynucleotide
caggtgcagctggtgcagtctggggctgaggtgaagaagcctgggtcctcggtgagggtctcctgcaaggcttctggagacaccttcagcaactatgctgtcagctgggtgcgacaggcccctggacaagggcttgagtggatgggagggatcgtccctctgtctgggacagtaaactacgcacagaggttccagggcagagtcacaattaacgcggacaaatccatgagcacggcctatatggagttgaccagtctgagatctgacgacacggccgtctattattgtgcgagaggcacgcggcagagggtggaagatcacttcaactactatgctttagacgtctggggccaagggaccgcggtcaccgtctcc

SEQ ID NO: 510 - protein, 125 aa, Artificial Sequence
  Description of Artificial Sequence: Synthetic polypeptide
QVQLVQSGAEVKKPGSSVRVSCKASGDTFSNYAVSWVRQAPGQGLEWMGGIVPLSGTVNYAQRFQGRVTINADKSMSTAYMELTSLRSDDTAVYYCARGTRQRVEDHFNYYALDVWGQGTAVTVS

SEQ ID NO: 511 - protein, 19 aa, Artificial Sequence
  Description of Artificial Sequence: Synthetic peptide
ARGTRQRVEDHFNYYALDV

SEQ ID NO: 512 - DNA, 325 bp, Artificial Sequence
  Description of Artificial Sequence: Synthetic polynucleotide
gaaattgtgttgacgcagtctccaggcaccctgtctttctctccaggggaaagagccaccctctcctgcagggccagtcagagtgttaacggcttctacttagcctggtaccagcaaaaacctggccaggctcccaggctcctcatttatgctgcatccatcagggccactggcatcccagacagattcagtggcagtgggtctgggacagtcttcactctcaccatcagcagactggaacctgaagattttgcagtgtattactgtcaacactatggtaggtcaccgctcattttcggcggagggaccaaggtggacatcaaac

SEQ ID NO: 513 - protein, 108 aa, Artificial Sequence
  Description of Artificial Sequence: Synthetic polypeptide
EIVLTQSPGTLSFSPGERATLSCRASQSVNGFYLAWYQQKPGQAPRLLIYAASIRATGIPDRFSGSGSGTVFTLTISRLEPEDFAVYYCQHYGRSPLIFGGGTKVDIK

SEQ ID NO: 514 - protein, 9 aa, Artificial Sequence
  Description of Artificial Sequence: Synthetic peptide
QHYGRSPLI

SEQ ID NO: 515 - DNA, 385 bp, Artificial Sequence
  Description of Artificial Sequence: Synthetic polynucleotide
caggtgcagctggtggagtctgggggaggcgtggtccagcctgggaggtccctgagactctcctgtgtagcgtctggattcaccttcagcagctatggaatgcactgggtccgccaggctccaggcaaggggctggagtgggtggcagttatctgggatgatggaagttatggaactcagagagagtatgcagactccgtgaagggccgattcaccatctccagagacaattccaggaacacggtgtatctggaaatgaacagcctgagagccgaggacacggctgtgtattactgtgcgagagacgacataagtatggttcggggagttatcaacaactggttcgacccctggggccagggaaccctggtcaccgtctcctcag

SEQ ID NO: 516 - protein, 128 aa, Artificial Sequence
  Description of Artificial Sequence: Synthetic polypeptide
QVQLVESGGGVVQPGRSLRLSCVASGFTFSSYGMHWVRQAPGKGLEWVAVIWDDGSYGTQREYADSVKGRFTISRDNSRNTVYLEMNSLRAEDTAVYYCARDDISMVRGVINNWFDPWGQGTLVTVSS

SEQ ID NO: 517 - protein, 18 aa, Artificial Sequence
  Description of Artificial Sequence: Synthetic peptide
ARDDISMVRGVINNWFDP

SEQ ID NO: 518 - DNA, 322 bp, Artificial Sequence
  Description of Artificial Sequence: Synthetic polynucleotide
gaaatagtgatgacgcagtctccagccaccctgtctctgttgccaggggcaagagccaccctctcctgcagggccagtcagagtgttagcagcaacttagcctggtaccagcaaaaacctgggcaggctcccaggctcctcatccaaggtgcatccaccagggccactggtatcccagtcaggttcagtggcagtgggtctgggacagagttcactctcaccatcagcagcctgcagtctgaagattttgcagtttattactgtcagcagtataataactggcccctttcgttcggccaagggaccaaggtggaaatcaaac

SEQ ID NO: 519 - protein, 107 aa, Artificial Sequence
  Description of Artificial Sequence: Synthetic polypeptide
EIVMTQSPATLSLLPGARATLSCRASQSVSSNLAWYQQKPGQAPRLLIQGASTRATGIPVRFSGSGSGTEFTLTISSLQSEDFAVYYCQQYNNWPLSFGQGTKVEIK

SEQ ID NO: 520 - protein, 9 aa, Artificial Sequence
  Description of Artificial Sequence: Synthetic peptide
QQYNNWPLS

SEQ ID NO: 521 - DNA, 352 bp, Artificial Sequence
  Description of Artificial Sequence: Synthetic polynucleotide
caggtgcagctggtgcagtctggggctgaggtgaagaagcctgggtcctcggtgaaggtctcctgcaaggcttctggaggcaccttcagcaactattatttcaactgggtgcgacaggcccgtggacaaggacttgagtacatgggagggatcatccctatttttggcacaacacactacgcacagaagttccagggcagagtcacgattaccgcggacgaatctgcgagcacagtgtacatggagttgagcagcctgagatctgaggacacggccgtttattactgtgcgagagatgactctatggtgctcagcgactggggccagggaaccctggtcaccgtctcctcag

SEQ ID NO: 522 - protein, 117 aa, Artificial Sequence
  Description of Artificial Sequence: Synthetic polypeptide
QVQLVQSGAEVKKPGSSVKVSCKASGGTFSNYYFNWVRQARGQGLEYMGGIIPIFGTTHYAQKFQGRVTITADESASTVYMELSSLRSEDTAVYYCARDDSMVLSDWGQGTLVTVSS

SEQ ID NO: 523 - protein, 10 aa, Artificial Sequence
  Description of Artificial Sequence: Synthetic peptide
ARDDSMVLSD

SEQ ID NO: 524 - DNA, 322 bp, Artificial Sequence
  Description of Artificial Sequence: Synthetic polynucleotide
gacatccagatgacccagtctccatcctccctgtctgcttctgtaggagacagagtcaccatcacttgccgggcaagtcagggcattagaaatgatttaggctggtttcagcagaaaccggggaaagcccctaagtgcctgatctatgctgcatccggtttgcagaatggggtcccatcaaggttcagcggcagtggatctgggacagaattcactctcacaatcagcagcctgcagcctgaagattttgcaacttattactgtctacagcataatacttacccgctcaccttcggcggagggaccaaggtggagatcaaac

SEQ ID NO: 525 - protein, 107 aa, Artificial Sequence
  Description of Artificial Sequence: Synthetic polypeptide
DIQMTQSPSSLSASVGDRVTITCRASQGIRNDLGWFQQKPGKAPKCLIYAASGLQNGVPSRFSGSGSGTEFTLTISSLQPEDFATYYCLQHNTYPLTFGGGTKVEIK

SEQ ID NO: 526 - protein, 9 aa, Artificial Sequence
  Description of Artificial Sequence: Synthetic peptide
LQHNTYPLT

SEQ ID NO: 527 - DNA, 370 bp, Artificial Sequence
  Description of Artificial Sequence: Synthetic polynucleotide
caggtgcagctgcaggagtcgggcccaggactggtgaagccttcggaaaccctgtccctcacctgcactgtctctggtggctccgtcagtagtggtagttactactggagctggatccggcagcccccagggaagggactggagtggattggttatgtctattccagtgggagccccaactacaactcctccctccagagtcgagccaccatatcagcagacacgtccaagaaccagttctccctaaaattgagctctctgaccgctgcggacacggccgtatattactgtgcgagagctgggagtaataactggtgggagagttatacggacgtctggggcaaagggacctcggtcatcgtctcctcag

SEQ ID NO: 528 - protein, 123 aa, Artificial Sequence
  Description of Artificial Sequence: Synthetic polypeptide
QVQLQESGPGLVKPSETLSLTCTVSGGSVSSGSYYWSWIRQPPGKGLEWIGYVYSSGSPNYNSSLQSRATISADTSKNQFSLKLSSLTAADTAVYYCARAGSNNWWESYTDVWGKGTSVIVSS

SEQ ID NO: 529 - protein, 15 aa, Artificial Sequence
  Description of Artificial Sequence: Synthetic peptide
ARAGSNNWWESYTDV

SEQ ID NO: 530 - DNA, 322 bp, Artificial Sequence
  Description of Artificial Sequence: Synthetic polynucleotide
gaaatagtgatgacgcagtctccagccaccctgtctgtgtctccaggggacagagccaccctttcctgcagggccagtcagagtattagcaacaacttagcctggtaccagcaaagatctgggcaggctcccaggctcctcatgtatggtgcatccaccagggccacaggtatcccagccaggttcagtggcagtgggtctgggacagagttcactctcaccatcagcagcctgcagtctgaagactttgcagtttattactgtcagcagtatggtaagtggccgtggacgttcggccaagggaccaaggtggaaatcaaac

SEQ ID NO: 531 - protein, 107 aa, Artificial Sequence
  Description of Artificial Sequence: Synthetic polypeptide
EIVMTQSPATLSVSPGDRATLSCRASQSISNNLAWYQQRSGQAPRLLMYGASTRATGIPARFSGSGSGTEFTLTISSLQSEDFAVYYCQQYGKWPWTFGQGTKVEIK

SEQ ID NO: 532 - protein, 9 aa, Artificial Sequence
  Description of Artificial Sequence: Synthetic peptide
QQYGKWPWT

SEQ ID NO: 533 - DNA, 352 bp, Artificial Sequence
  Description of Artificial Sequence: Synthetic polynucleotide
caggtccagctggtgcagtctggggctgaggtgaagaagcctgggtcctcggtgaaggtctcctgcaaggcttctggaggcaccttcagcaactatgttatcaactgggtgcgacaggcccctggacaagggcttgagtggatgggaaggatcatccctgtctttggtacagcaaactacgcacagaagttccagggcagactcacgataaccgcggacgaatcgacggacacagcctacatggaactgagcagcctgagatctgaggacacggccgtctattactgtgtgagagacacagctatggttcttacctactggggccagggatccctggtcaccgtctcctcag

SEQ ID NO: 534 - protein, 117 aa, Artificial Sequence
  Description of Artificial Sequence: Synthetic polypeptide
QVQLVQSGAEVKKPGSSVKVSCKASGGTFSNYVINWVRQAPGQGLEWMGRIIPVFGTANYAQKFQGRLTITADESTDTAYMELSSLRSEDTAVYYCVRDTAMVLTYWGQGSLVTVSS

SEQ ID NO: 535 - protein, 10 aa, Artificial Sequence
  Description of Artificial Sequence: Synthetic peptide
VRDTAMVLTY

SEQ ID NO: 536 - DNA, 322 bp, Artificial Sequence
  Description of Artificial Sequence: Synthetic polynucleotide
  modified_base (25)..(25): a, c, t, g, unknown or other
gacatccagatgacccagtctccantctccctgtctgcatctgtaggagacagagtcaccatcacttgtcgggcgagtcagggcattagcagtgatttagcctggtttcagcagaaaccagggaaagcccctgagtccctgatctatgctgcatccattttggaaagtggggtcccatcaaagttcagcggcaatggatctgggacatatttcactctcaccatcagcagcctgcagcctgaagattttgcaacttattactgcctacagtataatacttaccctctcactttcggcggagggaccaaggtggcgatcaaac

SEQ ID NO: 537 - protein, 107 aa, Artificial Sequence
  Description of Artificial Sequence: Synthetic polypeptide
  MOD_RES (9)..(9): Any amino acid
DIQMTQSPXSLSASVGDRVTITCRASQGISSDLAWFQQKPGKAPESLIYAASILESGVPSKFSGNGSGTYFTLTISSLQPEDFATYYCLQYNTYPLTFGGGTKVAIK

SEQ ID NO: 538 - protein, 9 aa, Artificial Sequence
  Description of Artificial Sequence: Synthetic peptide
LQYNTYPLT

SEQ ID NO: 539 - DNA, 351 bp, Artificial Sequence
  Description of Artificial Sequence: Synthetic polynucleotide
caggtgcagctggtgcagtctggggctgaggtgaagaagcctgggtcctcggtgaaggtctcctgcagggcctctggaggcacattcagcaactatgctatcggctgggtgcggcaggcccctggacaagggcttcagtggatgggagagatcatccctgcctttgctacaccacactacgcccagatcttccagggcagaatcacgattaccgcggacgaatccacgagcacagtctacatggaaatgaacaacctgagatctgacgacacggccgtctattactgtacgagagacgacgtctacggtctggacgtctggggccaagggaccgcggtcaccgtctcctca

SEQ ID NO: 540 - protein, 117 aa, Artificial Sequence
  Description of Artificial Sequence: Synthetic polypeptide
QVQLVQSGAEVKKPGSSVKVSCRASGGTFSNYAIGWVRQAPGQGLQWMGEIIPAFATPHYAQIFQGRITITADESTSTVYMEMNNLRSDDTAVYYCTRDDVYGLDVWGQGTAVTVSS

SEQ ID NO: 541 - protein, 10 aa, Artificial Sequence
  Description of Artificial Sequence: Synthetic peptide
TRDDVYGLDV

SEQ ID NO: 542 - DNA, 335 bp, Artificial Sequence
  Description of Artificial Sequence: Synthetic polynucleotide
gatgttgtgatgactcagtctccattctccctgcccgtcacccttggacagcacgcctccatctcctgcaggtctagtcacagcctcgtacacagagatggaaacacctacttgaactggtttcagcagaggccaggccaatctcctaggcgcctaatttttcaggtttctaaccgggactctggggtcccagaccgattcagcggcagtgggtcaggcactgatttcacactgaaaatcagcagggtggaggctgaggatgttgctatttattactgcatgcaaggtacacactggcctcggacttttggccaggggaccaaggtggagatcaa

SEQ ID NO: 543 - protein, 111 aa, Artificial Sequence
  Description of Artificial Sequence: Synthetic polypeptide
DVVMTQSPFSLPVTLGQHASISCRSSHSLVHRDGNTYLNWFQQRPGQSPRRLIFQVSNRDSGVPDRFSGSGSGTDFTLKISRVEAEDVAIYYCMQGTHWPRTFGQGTKVEI

SEQ ID NO: 544 - protein, 9 aa, Artificial Sequence
  Description of Artificial Sequence: Synthetic peptide
MQGTHWPRT

SEQ ID NO: 545 - DNA, 381 bp, Artificial Sequence
  Description of Artificial Sequence: Synthetic polynucleotide
gaggtgcagctgttggagtctgggggaggcttggtacagccgggggggtccctgagactctcctgtgcagtctctggattcacctttagcaactatgccatgaactgggtccgccaggctccaggaaaggggctggagtgggtctcagcgattagtgctagtggtggcacaacatacaacgctgagtctatgaagggccggttcaccatttccagagacaattcaaagaacatcctttatctgcaaatgaatagcctgagagccgaagacacggccgtatattattgtgcgcgagatggtctagagatggccacaacggattactacttctattacggtatggacgtctggggccaagggaccacggtcaccgtctcctca

SEQ ID NO: 546 - protein, 127 aa, Artificial Sequence
  Description of Artificial Sequence: Synthetic polypeptide
EVQLLESGGGLVQPGGSLRLSCAVSGFTFSNYAMNWVRQAPGKGLEWVSAISASGGTTYNAESMKGRFTISRDNSKNILYLQMNSLRAEDTAVYYCARDGLEMATTDYYFYYGMDVWGQGTTVTVSS

SEQ ID NO: 547 - protein, 20 aa, Artificial Sequence
  Description of Artificial Sequence: Synthetic peptide
ARDGLEMATTDYYFYYGMDV

SEQ ID NO: 548 - DNA, 322 bp, Artificial Sequence
  Description of Artificial Sequence: Synthetic polynucleotide
gacatccagatgacccagtctccatcctccctgtatgcatctgtgggagacagaactaccatctcttgccgggcaagtcagaacattgacacctatttaaattggtatcagcagaaatcagggaaagcccctaaactcctgatctatgctgcatccaatttgcaaagtggggtcccatcaagattcagtggcagtggatctggaacatatttcactcttacaatcagcagtctgcaacctgaagattttgcaacttactactgtcaacagagttacactaaggggatcaccttcggccaagggacacgtctagaaagtaaac

SEQ ID NO: 549 - protein, 107 aa, Artificial Sequence
  Description of Artificial Sequence: Synthetic polypeptide
DIQMTQSPSSLYASVGDRTTISCRASQNIDTYLNWYQQKSGKAPKLLIYAASNLQSGVPSRFSGSGSGTYFTLTISSLQPEDFATYYCQQSYTKGITFGQGTRLESK

SEQ ID NO: 550 - protein, 9 aa, Artificial Sequence
  Description of Artificial Sequence: Synthetic peptide
QQSYTKGIT

SEQ ID NO: 551 - DNA, 352 bp, Artificial Sequence; identical to SEQ ID NO: 161
  Description of Artificial Sequence: Synthetic polynucleotide

SEQ ID NO: 552 - protein, 117 aa, Artificial Sequence; identical to SEQ ID NO: 43
  Description of Artificial Sequence: Synthetic polypeptide

SEQ ID NO: 553 - protein, 10 aa, Artificial Sequence
  Description of Artificial Sequence: Synthetic peptide
ARDDSMVLSD

SEQ ID NO: 554 - DNA, 322 bp, Artificial Sequence
  Description of Artificial Sequence: Synthetic polynucleotide
  modified_base (22)..(22): a, c, t, g, unknown or other
  modified_base (24)..(26): a, c, t, g, unknown or other
  modified_base (28)..(28): a, c, t, g, unknown or other
gacatccagatgacccagtctncnnncnccctgtctgcatctgtaggagacagagtcaccatcacttgccgggcaagtcagggcattagaaatgatttaggctggtatcagcagaaaccagggcaaccccctaagcgcctgatctatgaagcatccactttactaagtggggtcccatcaaggttcagcggcagtggatctgggacagaattcactctcacaatcagcagcctgcagcctgaagattttgcgatttattattgtctacagcataatagttacccgctcactttcggcggagggaccaaggtggagatcaaac

SEQ ID NO: 555 - protein, 107 aa, Artificial Sequence
  Description of Artificial Sequence: Synthetic polypeptide
  MOD_RES (8)..(10): Any amino acid
DIQMTQSXXXLSASVGDRVTITCRASQGIRNDLGWYQQKPGQPPKRLIYEASTLLSGVPSRFSGSGSGTEFTLTISSLQPEDFAIYYCLQHNSYPLTFGGGTKVEIK

SEQ ID NO: 556 - protein, 9 aa, Artificial Sequence
  Description of Artificial Sequence: Synthetic peptide
LQHNSYPLT

SEQ ID NO: 557 - DNA, 346 bp, Artificial Sequence
  Description of Artificial Sequence: Synthetic polynucleotide
  modified_base (342)..(342): a, c, t, g, unknown or other
caggtgcagctggtggagtctgggggaggcgtggtccagcctgggaagtccttgagactctcatgtgcagcctctggattcaccttcagtaattatggcatgcactgggtccgccaggctccaggcaaggggctggagtgggtggcagtgatatcgtttgatgaaaatactaaacaatatgcagactccgtgaggggccgattcaccgtctccagagacaattcccagaacacgctgtatctgcaaatgaacagcctgagagccgaggacacggctgtctattactgtgtgagagcaacttggttcgacccctggggccagggaaccctggtcatcgtctcntcag

SEQ ID NO: 558 - protein, 115 aa, Artificial Sequence
  Description of Artificial Sequence: Synthetic polypeptide
QVQLVESGGGVVQPGKSLRLSCAASGFTFSNYGMHWVRQAPGKGLEWVAVISFDENTKQYADSVRGRFTVSRDNSQNTLYLQMNSLRAEDTAVYYCVRATWFDPWGQGTLVIVSS

SEQ ID NO: 559 - protein, 8 aa, Artificial Sequence
  Description of Artificial Sequence: Synthetic peptide
VRATWFDP

SEQ ID NO: 560 - DNA, 325 bp, Artificial Sequence
  Description of Artificial Sequence: Synthetic polynucleotide
gacatccagatgacccagtctccattctccctgtctgcatctgtaggagacagagtcaccatcacttgccgggcgagtcacgacattagaaactatttaaattggtatcagcaaaaaccagggaaagcccctaagctcctgatctccgatgcatccaatttggaaacaggggtcccatcaaggttcagtggaagtggatctgggacagattttactttcaccatcagcagtctgcagcctgaagatattgcaacatattactgtcaacattatgataatctgtctcggtggacgttcggccaggggaccaaggtggaaatcaaac

SEQ ID NO: 561 - protein, 108 aa, Artificial Sequence
  Description of Artificial Sequence: Synthetic polypeptide
DIQMTQSPFSLSASVGDRVTITCRASHDIRNYLNWYQQKPGKAPKLLISDASNLETGVPSRFSGSGSGTDFTFTISSLQPEDIATYYCQHYDNLSRWTFGQGTKVEIK

SEQ ID NO: 562 - skipped

SEQ ID NO: 563 - DNA, 382 bp, Artificial Sequence
  Description of Artificial Sequence: Synthetic polynucleotide
caggtgcagctggtggagtctgggggaggcgtggtccagcctgggaggtccctgagactctcctgtgcagcgtctggattcaccttcagtaactctggcatgcactgggtccgccaggctccaggcaaggggctggagtgggtggcagttatatggtatgatggaaataatcaatactatgcagactccgtgaagggccgattcaccatctccagagacaattccaagaataccctgtatctgcaaatgaacagcctgagagccgaggacacggctgtgtattactgtgcgagaggagtggaggacgatttttggagtggttattccgtaaataactggttcgacccctggggccagggaaccctggtcaccgtctcctcag

SEQ ID NO: 564 - protein, 127 aa, Artificial Sequence
  Description of Artificial Sequence: Synthetic polypeptide
QVQLVESGGGVVQPGRSLRLSCAASGFTFSNSGMHWVRQAPGKGLEWVAVIWYDGNNQYYADSVKGRFTISRDNSKNTLYLQMNSLRAEDTAVYYCARGVEDDFWSGYSVNNWFDPWGQGTLVTVSS

SEQ ID NO: 565 - protein, 20 aa, Artificial Sequence
  Description of Artificial Sequence: Synthetic peptide
ARGVEDDFWSGYSVNNWFDP

SEQ ID NO: 566 - DNA, 322 bp, Artificial Sequence
  Description of Artificial Sequence: Synthetic polynucleotide
  modified_base (28)..(28): a, c, t, g, unknown or other
gaaatagtgatgacgcagtctccagtcnccctgtctgtgtctccaggggaaagagccaccctctcctgcagggccagtcagagtgttagcagcaacttagcctggtaccagcagaaacctgaccaggctcccaggctcctcatgtatggagcatccactagggccactggtatcccagccaggttcactggcagtgggtctgggacagagttcactctcaccatcagcagcctgcagtctgaagattttgcagtttattactgtcagcagtataataattggccccagacttttggccaggggaccaagctggagatcaaac

SEQ ID NO: 567 - protein, 107 aa, Artificial Sequence
  Description of Artificial Sequence: Synthetic polypeptide
  MOD_RES (10)..(10): Any amino acid
EIVMTQSPVXLSVSPGERATLSCRASQSVSSNLAWYQQKPDQAPRLLMYGASTRATGIPARFTGSGSGTEFTLTISSLQSEDFAVYYCQQYNNWPQTFGQGTKLEIK

SEQ ID NO: 568 - protein, 9 aa, Artificial Sequence
  Description of Artificial Sequence: Synthetic peptide
QQYNNWPQT

SEQ ID NO: 569 - DNA, 355 bp, Artificial Sequence
  Description of Artificial Sequence: Synthetic polynucleotide
caggtgcagctggtgcagtctggggctgtagtgaagaagcctgggtcctcggtgaaggtctcctgcaaggcttctggaggctccttcagcaactttgctatgcactgggtgcgacaggcccctggacaagggcttgagtggatgggaggcctcatccctgcctttggaacaccacactacgcacagggcttgcagggcagagtcaccatttccgcggacgagtccacgagcacggcctacatggagctgagcggcctgagaagtgacgacacggccgtgtattactgtgcgagagaggggggtaacagtggccttgagtactggggccagggaaccctggtcaccgtctcctcag

SEQ ID NO: 570 - protein, 118 aa, Artificial Sequence
  Description of Artificial Sequence: Synthetic polypeptide
QVQLVQSGAVVKKPGSSVKVSCKASGGSFSNFAMHWVRQAPGQGLEWMGGLIPAFGTPHYAQGLQGRVTISADESTSTAYMELSGLRSDDTAVYYCAREGGNSGLEYWGQGTLVTVSS

SEQ ID NO: 571 - protein, 11 aa, Artificial Sequence
  Description of Artificial Sequence: Synthetic peptide
AREGGNSGLEY

SEQ ID NO: 572 - DNA, 325 bp, Artificial Sequence
  Description of Artificial Sequence: Synthetic polynucleotide
gacatccagatgacccagtctccttccaccctgtctgcatctgttggtgacagagtcaccatcacttgccgggccagtcagagtattggttcctggttggcctggtatcagcaaaagccagggagagcccctaagctcctgatctctaaggcgtctgatttagaaactggggtcccatcaaggttcagcggcagtggatctgggacagaattcactctcaccatcagcagcctgcagcctgatgattttgcaacttattactgccaaaaatataatacttattcgtcgctcactttcggcggagggaccaaggtggagatcaaac

SEQ ID NO: 573 - protein, 108 aa, Artificial Sequence
  Description of Artificial Sequence: Synthetic polypeptide
DIQMTQSPSTLSASVGDRVTITCRASQSIGSWLAWYQQKPGRAPKLLISKASDLETGVPSRFSGSGSGTEFTLTISSLQPDDFATYYCQKYNTYSSLTFGGGTKVEIK

SEQ ID NO: 574 - protein, 10 aa, Artificial Sequence
  Description of Artificial Sequence: Synthetic peptide
QKYNTYSSLT

SEQ ID NO: 575 - DNA, 352 bp, Artificial Sequence
  Description of Artificial Sequence: Synthetic polynucleotide
caggtgcagctggtggagtctgggggaggcttggtcaagcctggagggtccctgagactctcctgtgcagcctctggattcactttcagtgactactacatgaactggatccgtcaggctccagggaaggggctggagtggatttcatacattgataatcgtggtgatcccatatactactcagactctgtgaagggccgattcaccatctccagggacaacgccaggaactcactctatctgcaaatgaatggcctgagagccgaagacacggccgtctattactgtgcgagagactttcggatttttggaggggcctggggccagggaaccccggtcatcgtatcctcag

SEQ ID NO: 576 - protein, 117 aa, Artificial Sequence
  Description of Artificial Sequence: Synthetic polypeptide
QVQLVESGGGLVKPGGSLRLSCAASGFTFSDYYMNWIRQAPGKGLEWISYIDNRGDPIYYSDSVKGRFTISRDNARNSLYLQMNGLRAEDTAVYYCARDFRIFGGAWGQGTPVIVSS

SEQ ID NO: 577 - protein, 10 aa, Artificial Sequence
  Description of Artificial Sequence: Synthetic peptide
ARDFRIFGGA

SEQ ID NO: 578 - DNA, 319 bp, Artificial Sequence
  Description of Artificial Sequence: Synthetic polynucleotide
gacatccagatgacccagtctccatcctccctgtctgcatctgtaggagacagagtcaccatcacttgccaggcgagtcaggacattcgcaactatttgaattggttccagcagaaaccagggaaagcccctcaactcctgatttatgatgcatccaatgtggaaacaggggtcacatcaaggttcagtggaagtggatctgggacacattttactttcaccatcagcagcctgcagcctgaagatgttgcaacttactactgtcaacaatatcataggctcctgactttcggcggagggaccagggtggagattaaac

SEQ ID NO: 579 - protein, 106 aa, Artificial Sequence
  Description of Artificial Sequence: Synthetic polypeptide
DIQMTQSPSSLSASVGDRVTITCQASQDIRNYLNWFQQKPGKAPQLLIYDASNVETGVTSRFSGSGSGTHFTFTISSLQPEDVATYYCQQYHRLLTFGGGTRVEIK

SEQ ID NO: 580 - protein, 8 aa, Artificial Sequence
  Description of Artificial Sequence: Synthetic peptide
QQYHRLLT

SEQ ID NO: 581 - DNA, 360 bp, Artificial Sequence
  Description of Artificial Sequence: Synthetic polynucleotide
caggtgcagctggtgcagtctggggctgaggtgaagaagcctggggcctcagtgaaggtctcctgtaaggcctctggatacaccctcatcaattatgacatcaactggctgcgacaggccactggacaagggcctgagtggatggggtggatgaaccctagcagtggtaagacaggctatgcacagaagtttcaggggagggtcaccatgaccacggacacctccataaacacagcctacatggagctgaccagcctgacatctgaggacacggccatctattattgtgcgagagaagagaggcgatatgactatggtctcgacgtctggggccaagggaccacggtcaccgtctcctca

SEQ ID NO: 582 - protein, 120 aa, Artificial Sequence
  Description of Artificial Sequence: Synthetic polypeptide
QVQLVQSGAEVKKPGASVKVSCKASGYTLINYDINWLRQATGQGPEWMGWMNPSSGKTGYAQKFQGRVTMTTDTSINTAYMELTSLTSEDTAIYYCAREERRYDYGLDVWGQGTTVTVSS

SEQ ID NO: 583 - protein, 13 aa, Artificial Sequence
  Description of Artificial Sequence: Synthetic peptide
AREERRYDYGLDV

SEQ ID NO: 584 - DNA, 325 bp, Artificial Sequence
  Description of Artificial Sequence: Synthetic polynucleotide
gaaattgtgttgacacagtctccagccaccctgtctttgtctccaggggaaagagccaccctctcctgcagggccagtcagagtgttagcagctacttagcctggtaccaacagaaacctggccaggctcccaggctcctcatctatgatgcatccaacagggccactggcatcccagccaggttcagtggcagtgggtctgggacagacttcactctcaccatcagcagcctagagcctgaagattttgcagtttattactgtcagcagcgtagcaattggcctcggatcaccttcggccaagggacacgactggagattaaac

SEQ ID NO: 585 - protein, 108 aa, Artificial Sequence
  Description of Artificial Sequence: Synthetic polypeptide
EIVLTQSPATLSLSPGERATLSCRASQSVSSYLAWYQQKPGQAPRLLIYDASNRATGIPARFSGSGSGTDFTLTISSLEPEDFAVYYCQQRSNWPRITFGQGTRLEIK

SEQ ID NO: 586 - protein, 10 aa, Artificial Sequence
  Description of Artificial Sequence: Synthetic peptide
QQRSNWPRIT

SEQ ID NO: 587 - DNA, 358 bp, Artificial Sequence
  Description of Artificial Sequence: Synthetic polynucleotide
caggtgcagctggtgcagtctggggctgaggtgaagaagcctgggtcctcggtgaaagtctcctgcaagtcttctggaggcaacttcaacaactatgctatcaactgggtgcgactggcccctggacaggggcttgagtggatgggagaagtcatccctctctttaatacaccaaactacgcacagaagttccagggcagagtcacgatttccgcggacggatccacgagcacagtgtacatggagctgaagagtctgagatctgacgacacggccgtttattattgtgccagagatggaggggccccgccccacttccaacactggggccagggcaccctggtcaccgtctcctcag

SEQ ID NO: 588 - protein, 119 aa, Artificial Sequence
  Description of Artificial Sequence: Synthetic polypeptide
QVQLVQSGAEVKKPGSSVKVSCKSSGGNFNNYAINWVRLAPGQGLEWMGEVIPLFNTPNYAQKFQGRVTISADGSTSTVYMELKSLRSDDTAVYYCARDGGAPPHFQHWGQGTLVTVSS

SEQ ID NO: 589 - protein, 12 aa, Artificial Sequence
  Description of Artificial Sequence: Synthetic peptide
ARDGGAPPHFQH

SEQ ID NO: 590 - DNA, 322 bp, Artificial Sequence
  Description of Artificial Sequence: Synthetic polynucleotide
  modified_base (55)..(55): a, c, t, g, unknown or other
gacatccagatgacccagtctccatcctccctgtctgcatctgtgggagacagantcaccatcacttgccggtcaagtcagaccattggcgactttttgaattggtatcagcagagcccagggaaagcccccaagctcctgatctacgctgcatccaatttggagagtggggtcccatcaaggttcagtggcagtggatctgggacagatttcattctcaccattaacaatctgcaacctgaagactttgcaacttactactgtcagcagagtcacggtaagccttggacattcggccgagggaccaaggtggaaatcaaac

SEQ ID NO: 591 - protein, 107 aa, Artificial Sequence
  Description of Artificial Sequence: Synthetic polypeptide
  MOD_RES (19)..(19): Any amino acid
DIQMTQSPSSLSASVGDRXTITCRSSQTIGDFLNWYQQSPGKAPKLLIYAASNLESGVPSRFSGSGSGTDFILTINNLQPEDFATYYCQQSHGKPWTFGRGTKVEIK

SEQ ID NO: 592 - protein, 9 aa, Artificial Sequence
  Description of Artificial Sequence: Synthetic peptide
QQSHGKPWT

SEQ ID NO: 593 - DNA, 352 bp, Artificial Sequence
  Description of Artificial Sequence: Synthetic polynucleotide
caggtgcagctggtgcagtctggggctgaggtgaagaagcctgggtcctcggtgaaggtctcctgcaagacttctggagacagcttcagcaccaatactatcagctgggtgcgacaggcccctggacaagggcttgagtggatgggcgggatcatccctgtctttggaacaccaaattacgcacagaaattccagggcagagtcagaattaccgcggacgaatccacgagcacagcctacatggagctgagcagcctgagatctgaggacacggccgtatatttctgtgcgagaaaggggggttgggcgtataactactggggccagggaaccctggtcaccgtctcctcag

SEQ ID NO: 594 - protein, 117 aa, Artificial Sequence
  Description of Artificial Sequence: Synthetic polypeptide
QVQLVQSGAEVKKPGSSVKVSCKTSGDSFSTNTISWVRQAPGQGLEWMGGIIPVFGTPNYAQKFQGRVRITADESTSTAYMELSSLRSEDTAVYFCARKGGWAYNYWGQGTLVTVSS

SEQ ID NO: 595 - protein, 10 aa, Artificial Sequence
  Description of Artificial Sequence: Synthetic peptide
ARKGGWAYNY

SEQ ID NO: 596 - DNA, 322 bp, Artificial Sequence
  Description of Artificial Sequence: Synthetic polynucleotide
  modified_base (25)..(25): a, c, t, g, unknown or other
gacatccagatgacccagtctccantctccctgtctgcatctgtgggagacagagtcaccatcacttgccaggcgagtcaagacattagtaactatttaaattggtatcagcagaaaccagggaaagcccctaaggccctgatctacgatgcatcgaatttggaaacaggggtcccatcaaggttcagtggaagtggatctgggacagattttactttcaccatcagcagcctgcagcctgaagattttgcaacatattactgtcagcagtatgctaatctccccgacacttttggccaggggaccaagctggagatcaaac

SEQ ID NO: 597 - protein, 107 aa, Artificial Sequence
  Description of Artificial Sequence: Synthetic polypeptide
  MOD_RES (9)..(9): Any amino acid
DIQMTQSPXSLSASVGDRVTITCQASQDISNYLNWYQQKPGKAPKALIYDASNLETGVPSRFSGSGSGTDFTFTISSLQPEDFATYYCQQYANLPDTFGQGTKLEIK

SEQ ID NO: 598 - protein, 9 aa, Artificial Sequence
  Description of Artificial Sequence: Synthetic peptide
QQYANLPDT

SEQ ID NO: 599 - DNA, 349 bp, Artificial Sequence
  Description of Artificial Sequence: Synthetic polynucleotide
caggtgcagctggtgcagtctggggctgaggtgaagaagcctgggtcctcggtgaaggtctcctgcaaggcttctggaggcaccttcaacacctatactatcgcctgggtgcgacaggcccctggacaagggcttgagtggatgggagggatcatccctatctttggtacaccaagctacgcacagaggttccagggccgagtcacgattaccgcggacgaatccacgagcacagtctacatggagctgagcagcctgagatctgacgacacggccgtgtactactgtgcgaaagatctttgggggttcgacccctggggccagggaaccctggtcaccgtctcctcag

SEQ ID NO: 600 - protein, 116 aa, Artificial Sequence
  Description of Artificial Sequence: Synthetic polypeptide
QVQLVQSGAEVKKPGSSVKVSCKASGGTFNTYTIAWVRQAPGQGLEWMGGIIPIFGTPSYAQRFQGRVTITADESTSTVYMELSSLRSDDTAVYYCAKDLWGFDPWGQGTLVTVSS

SEQ ID NO: 601 - protein, 9 aa, Artificial Sequence
  Description of Artificial Sequence: Synthetic peptide
AKDLWGFDP

SEQ ID NO: 602 - DNA, 325 bp, Artificial Sequence
  Description of Artificial Sequence: Synthetic polynucleotide
gaaattgtgttgacgcagtctccaggcaccctgtctttgtctccaggggaaagagccaccctctcctgcagggccagtcagagtgttagcagcgactacttagcctggtaccagcagaaacctggccaggctcccaggctcctcatctatggtgcatccaccagggccactggcatcccagacaggttcagtggcagtgggtctgggacagacttcactctcaccatcagcggactggaggctgaagattttgcagtgtattactgtcagcactatggtagctcacctaaaacgttcggccaagggaccaaggtggaaatcaaac

SEQ ID NO: 603 - protein, 108 aa, Artificial Sequence
  Description of Artificial Sequence: Synthetic polypeptide
EIVLTQSPGTLSLSPGERATLSCRASQSVSSDYLAWYQQKPGQAPRLLIYGASTRATGIPDRFSGSGSGTDFTLTISGLEAEDFAVYYCQHYGSSPKTFGQGTKVEIK

SEQ ID NO: 604 - protein, 9 aa, Artificial Sequence
  Description of Artificial Sequence: Synthetic peptide
QHYGSSPKT

SEQ ID NO: 605 - DNA, 361 bp, Artificial Sequence
  Description of Artificial Sequence: Synthetic polynucleotide
caggtgcagctgcaggagtcgggcccaggactggtgaagccttcggagaccctgtccctcacctgcactgtctctgatggctccatcagtagtcattactggagctggatccggcagtccccagggaagggactcgaatacattggctatatctactccagtggaagcaccaacagccacccctccctcaacagtcgagtcaccatatctttagacaggtcccagaatcagttctccctgaagctgacctctgtgaccgctgcggacacggccgtctattattgtgcgaccctaagtggggacagtggccactggtacttcgatctctggggccgtggcaccctggtcactgtctcctcag

SEQ ID NO: 606 - protein, 120 aa, Artificial Sequence
  Description of Artificial Sequence: Synthetic polypeptide
QVQLQESGPGLVKPSETLSLTCTVSDGSISSHYWSWIRQSPGKGLEYIGYIYSSGSTNSHPSLNSRVTISLDRSQNQFSLKLTSVTAADTAVYYCATLSGDSGHWYFDLWGRGTLVTVSS

SEQ ID NO: 607 - protein, 14 aa, Artificial Sequence
  Description of Artificial Sequence: Synthetic peptide
ATLSGDSGHWYFDL

SEQ ID NO: 608 - DNA, 322 bp, Artificial Sequence
  Description of Artificial Sequence: Synthetic polynucleotide
gaaattgtgttgacacagtctccagccaccctgtctttgtctccaggggaaagagccaccctctcctgcagggccagtcagagtgttagcaacgacttagcctggtaccagcagaaacctggccaggctcccaggctcctcatctatgctgcttccaacagggccacaggcatcccagccaggttcagtggcagtgggtctgggacagacttcactctcaccatcagcagcctagagcctgaagattttgcggtttattactgtcagcagcgtagcaactggccgtacacttttggccaggggaccaagctggagatcaaac

SEQ ID NO: 609 - protein, 107 aa, Artificial Sequence
  Description of Artificial Sequence: Synthetic polypeptide
EIVLTQSPATLSLSPGERATLSCRASQSVSNDLAWYQQKPGQAPRLLIYAASNRATGIPARFSGSGSGTDFTLTISSLEPEDFAVYYCQQRSNWPYTFGQGTKLEIK

SEQ ID NO: 610 - protein, 9 aa, Artificial Sequence
  Description of Artificial Sequence: Synthetic peptide
QQRSNWPYT

SEQ ID NO: 611 - DNA, 352 bp, Artificial Sequence
  Description of Artificial Sequence: Synthetic polynucleotide
caggtgcagctggtgcagtctggggctgaggtgaagatgcctgagtcctcggtgaaggtctcctgcaaggcttctggaggcaccttcagcacctctactgtcagctgggtgcgacaggcccctggacaagggcttgagtggatgggaggaatcatccctgtttttcgtacaccaaagtacgcacagaagtttcagggcagagtcacgattaccgcggacgaatccgcgaacactgcctacatggagctgagcagcctgagatctgacgacacggccgtatattactgtacgatcgggacctatgtcgagattgactattggggccagggaaccctagtcatcgtctcctcag

SEQ ID NO: 612 - protein, 117 aa, Artificial Sequence
  Description of Artificial Sequence: Synthetic polypeptide
QVQLVQSGAEVKMPESSVKVSCKASGGTFSTSTVSWVRQAPGQGLEWMGGIIPVFRTPKYAQKFQGRVTITADESANTAYMELSSLRSDDTAVYYCTIGTYVEIDYWGQGTLVIVSS

SEQ ID NO: 613 - protein, 10 aa, Artificial Sequence
  Description of Artificial Sequence: Synthetic peptide
TIGTYVEIDY

SEQ ID NO: 614 - DNA, 325 bp, Artificial Sequence
  Description of Artificial Sequence: Synthetic polynucleotide
gaaattgtgttgacgcagtctccaggcaccctgtctttgtctccaggggaaagagccaccctctcctgcagggccagtcagagtgttagcagcgactacttaacctggtatcagcagaaacctggccaggctcccaggctcctcatctatggtgcatccaccagggccactggcatcccagacaggttcagtggcagtgggtctgggacagacttcactctcaccatcaccagactggagcctgaagattttgcagtgtattactgtcaccagtatggtacctcaccgctcactttcggcggagggaccaaagtggagatcaaac

SEQ ID NO: 615 - protein, 108 aa, Artificial Sequence
  Description of Artificial Sequence: Synthetic polypeptide
EIVLTQSPGTLSLSPGERATLSCRASQSVSSDYLTWYQQKPGQAPRLLIYGASTRATGIPDRFSGSGSGTDFTLTITRLEPEDFAVYYCHQYGTSPLTFGGGTKVEIK

SEQ ID NO: 616 - protein, 9 aa, Artificial Sequence
  Description of Artificial Sequence: Synthetic peptide
HQYGTSPLT

SEQ ID NO: 617 - DNA, 355 bp, Artificial Sequence
  Description of Artificial Sequence: Synthetic polynucleotide
caggtgcagctggtgcagtctggggctgaggtgaagaagcctgggtcctcggtgaaggtctcctgtaaggtttctggaggcaacttcaataactatgctatcagctgggtgcgacaggcccctggacaagggcttgagtggatgggagagatcatccctgtctttgccacaccgaggttcgcacagagattccaggacagagtcacgattactgcagacaaatccacgagcacagcctacatggaactgagcagcctgagacccgaggacacggccatatattactgtgcgagagatgggggtacagcatcttttgactactggggccagggaaccctggtcaccgtctcctcag

SEQ ID NO: 618 - protein, 118 aa, Artificial Sequence
  Description of Artificial Sequence: Synthetic polypeptide
QVQLVQSGAEVKKPGSSVKVSCKVSGGNFNNYAISWVRQAPGQGLEWMGEIIPVFATPRFAQRFQDRVTITADKSTSTAYMELSSLRPEDTAIYYCARDGGTASFDYWGQGTLVTVSS

SEQ ID NO: 619 - protein, 11 aa, Artificial Sequence
  Description of Artificial Sequence: Synthetic peptide
ARDGGTASFDY

SEQ ID NO: 620 - DNA, 335 bp, Artificial Sequence
  Description of Artificial Sequence: Synthetic polynucleotide
gatattgtgatgactcagtctccactctccctgcccgtcacccctggagagccggcctccatctcctgtaggtctagtcagagcctcctgcatcgtgatggaaacaactatttggattggtacctgcagaagccagggcagtctccacagctcctgatctattggggttctaatcgggcctccggggtccctgacaggttcagtggcagtgggtcaggcacagattttacactgaaaatcagcagagtggaggctgaggatgttggggtttattactgcatgcaagctctacagactcctaaaactttcggccctgggaccaaactggatatcaa

SEQ ID NO: 621 - protein, 111 aa, Artificial Sequence
  Description of Artificial Sequence: Synthetic polypeptide
DIVMTQSPLSLPVTPGEPASISCRSSQSLLHRDGNNYLDWYLQKPGQSPQLLIYWGSNRASGVPDRFSGSGSGTDFTLKISRVEAEDVGVYYCMQALQTPKTFGPGTKLDI

SEQ ID NO: 622 - protein, 9 aa, Artificial Sequence
  Description of Artificial Sequence: Synthetic peptide
MQALQTPKT

SEQ ID NO: 623 - DNA, 355 bp, Artificial Sequence
  Description of Artificial Sequence: Synthetic polynucleotide
caggtgcagctggtgcagtctggggctgaagtgaagaagcctgggtcctcggtgagggtctcctgccaggcttctggagacaccttcagcaattatgctatcagctgggtgcgacaggcccctggacaagggcttgagtggatgggagggatcatccctatgtttgatacaccacactacgcacagaggttccagggcagagtcagcataaccgcggacgaatccacgagcacagcctacatggagctgagctggctgagatctgaggacacggccgtatattactgtgtgcgagatagtggctatatccggtttgactactggggccagggaaccctggtcaccgtctcctcag

SEQ ID NO: 624 - protein, 118 aa, Artificial Sequence
  Description of Artificial Sequence: Synthetic polypeptide
QVQLVQSGAEVKKPGSSVRVSCQASGDTFSNYAISWVRQAPGQGLEWMGGIIPMFDTPHYAQRFQGRVSITADESTSTAYMELSWLRSEDTAVYYCVRDSGYIRFDYWGQGTLVTVSS

SEQ ID NO: 625 - protein, 11 aa, Artificial Sequence
  Description of Artificial Sequence: Synthetic peptide
VRDSGYIRFDY

SEQ ID NO: 626 - DNA, 322 bp, Artificial Sequence
  Description of Artificial Sequence: Synthetic polynucleotide
gacatccagatgacccagtctccatcctccctgtctgtatctgtaggagacagagtcaccatcacttgccaggcgagtcaggacatcagcaactctgtaaattggtttcagcagaaaccagggaaagcccctaaactcctgatctacgatgcatccaatttggaaacaggggtcccatcaaggttcagtggaagtggatctgggacagattttactttcaccatcatcagcctgcagcctgaagatattgcaacatattattgtcaacagtatgataaactctcgtccacttttggccaggggaccaagctggagatgaaac

SEQ ID NO: 627 - protein, 107 aa, Artificial Sequence
  Description of Artificial Sequence: Synthetic polypeptide
DIQMTQSPSSLSVSVGDRVTITCQASQDISNSVNWFQQKPGKAPKLLIYDASNLETGVPSRFSGSGSGTDFTFTIISLQPEDIATYYCQQYDKLSSTFGQGTKLEMK

SEQ ID NO: 628 - protein, 9 aa, Artificial Sequence
  Description of Artificial Sequence: Synthetic peptide
QQYDKLSST

SEQ ID NO: 629 - DNA, 368 bp, Artificial Sequence
  Description of Artificial Sequence: Synthetic polynucleotide
gaggtgcagctggtggagtctgggggaggcctggtcaagcctggggggtccctgagactctcctgtgcagcctctggattcaccttcagtgactttagcatgaactgggtccgccaggctccagggaaggggctggagtggatctcttacattagtagtactggtagtgacatatactacgcagactcagcgcagggccgattcaccatctccagagacaacgccaagaattcactgtttctgcaaatgaacagcctgagagccgaggacacggctacttattactgtgcgagagaaggtttagagagcggtagtttttatgaattcttccaacactggggccagggcaccctggtcaccgtcttctc

SEQ ID NO: 630 - protein, 122 aa, Artificial Sequence
  Description of Artificial Sequence: Synthetic polypeptide
EVQLVESGGGLVKPGGSLRLSCAASGFTFSDFSMNWVRQAPGKGLEWISYISSTGSDIYYADSAQGRFTISRDNAKNSLFLQMNSLRAEDTATYYCAREGLESGSFYEFFQHWGQGTLVTVF

SEQ ID NO: 631 - protein, 16 aa, Artificial Sequence
  Description of Artificial Sequence: Synthetic peptide
AREGLESGSFYEFFQH

SEQ ID NO: 632 - DNA, 325 bp, Artificial Sequence
  Description of Artificial Sequence: Synthetic polynucleotide
  modified_base (25)..(25): a, c, t, g, unknown or other
gacatccagatgacccagtctccantctccctgtctgcatctgtaggagacagagtcaccatcacttgccgggccagtcagactattagtaggtggttggcctggtatcagcagaaaccagggaaagcccctaaactcctgatctataaggcgtctaatttagaaagtggggtcccattaaggttcagcggcagtggatctggtacacatttcactctcaccatcagcagcctgcagcctgatgattttgcaacttattactgccaacagtataatactttttctcggatcaccttcggcggagggaccaaggtggagatcaaac

SEQ ID NO: 633 - protein, 108 aa, Artificial Sequence
  Description of Artificial Sequence: Synthetic polypeptide
  MOD_RES (9)..(9): Any amino acid
DIQMTQSPXSLSASVGDRVTITCRASQTISRWLAWYQQKPGKAPKLLIYKASNLESGVPLRFSGSGSGTHFTLTISSLQPDDFATYYCQQYNTFSRITFGGGTKVEIK

SEQ ID NO: 634 - protein, 10 aa, Artificial Sequence
  Description of Artificial Sequence: Synthetic peptide
QQYNTFSRIT

SEQ ID NO: 635 - DNA, 372 bp, Artificial Sequence
  Description of Artificial Sequence: Synthetic polynucleotide
gaggtgcagctggtggagtctgggggaggcttggtacagcctggagggtccctgagactatcatgtgtggtgtctggatttacattcagtacttatgaaatgaactggttccgccaggctccagggaagggactggagtgggtttcgtccattagcagcggtgggagtgacatgttgtatgcagactctgtgaagggccgattcactgtctccagagacaatgccaagaagtcactgtttctgcaaatgcacagcctgagacccgaggactcggctgtttattactgtgccagagtgggcaatttttggagtggttacccggggcactacatggacgcctggggcaaagggaccacggtcaccgtctcctca

SEQ ID NO: 636 - protein, 124 aa, Artificial Sequence
  Description of Artificial Sequence: Synthetic polypeptide
EVQLVESGGGLVQPGGSLRLSCVVSGFTFSTYEMNWFRQAPGKGLEWVSSISSGGSDMLYADSVKGRFTVSRDNAKKSLFLQMHSLRPEDSAVYYCARVGNFWSGYPGHYMDAWGKGTTVTVSS

SEQ ID NO: 637 - protein, 17 aa, Artificial Sequence
  Description of Artificial Sequence: Synthetic peptide
ARVGNFWSGYPGHYMDA

SEQ ID NO: 638 - DNA, 322 bp, Artificial Sequence
  Description of Artificial Sequence: Synthetic polynucleotide
gaaattgtgttgacacagtctccagccaccctgtctgtgtctccagggcaaagagccaccctcacgtgcagggccagtcagagtattagcacttacttagcctggtaccaacacaagcctggccaggctcccaggctcctcatctatgatgcatcctacagactcactggcatcccagtcaggttcagtggcagtgggtctgggacagacttcactctcaccatcagcagcctagagcctgaagactttgcagtttattactgtcaacaacgtagccactggccggggactttcggccaggggaccaagctggagatcaaac

SEQ ID NO: 639 - protein, 107 aa, Artificial Sequence
  Description of Artificial Sequence: Synthetic polypeptide
EIVLTQSPATLSVSPGQRATLTCRASQSISTYLAWYQHKPGQAPRLLIYDASYRLTGIPVRFSGSGSGTDFTLTISSLEPEDFAVYYCQQRSHWPGTFGQGTKLEIK

SEQ ID NO: 640 - protein, 9 aa, Artificial Sequence
  Description of Artificial Sequence: Synthetic peptide
QQRSHWPGT

SEQ ID NO: 641 - DNA, 349 bp, Artificial Sequence
  Description of Artificial Sequence: Synthetic polynucleotide
caggtgcagctggtgcagtctggggctgaggtgaagagtcctgggtcctcggtgaaggtctcctgcaaggcttctggaggcaccttcagcaatcatcctatcagctgggtgcgacaggcccctggacaagggcttgagtggatgggagggatcatccctagctttggaacagcacactacgcacagaagttccagggcagagtcacgattaccgcggacgaacccacgagcacagcctacatggagctgagcagcctgagatcggatgacacggccgtttattattgtgcgaccggatacagttatggcgactactggggccagggaaccctggtcaccgtctcctcag

SEQ ID NO: 642 - protein, 116 aa, Artificial Sequence
  Description of Artificial Sequence: Synthetic polypeptide
QVQLVQSGAEVKSPGSSVKVSCKASGGTFSNHPISWVRQAPGQGLEWMGGIIPSFGTAHYAQKFQGRVTITADEPTSTAYMELSSLRSDDTAVYYCATGYSYGDYWGQGTLVTVSS

SEQ ID NO: 643 - protein, 9 aa, Artificial Sequence
  Description of Artificial Sequence: Synthetic peptide
ATGYSYGDY

SEQ ID NO: 644 - DNA, 325 bp, Artificial Sequence
  Description of Artificial Sequence: Synthetic polynucleotide
gacatccagatgacccagtctccatcctccctgtctgcatctgtaggagacagagtcaccatcacttgccaggcgagtcaagacattaataggtatttaaattggtatcagcagaaaccagggaaagcccctaagctcctgatctacgatgcatccaatttggaaacaggggtcccatcgaggttcagtggaagtgcatctgggacagattttactttcaccatcagcagcctgcagcctgaagatattgcaacatattactgtcaacagtatgataatctccatgtagtcactttcggccctgggaccaaagtggatatcaaac

SEQ ID NO: 645 - protein, 108 aa, Artificial Sequence
  Description of Artificial Sequence: Synthetic polypeptide
DIQMTQSPSSLSASVGDRVTITCQASQDINRYLNWYQQKPGKAPKLLIYDASNLETGVPSRFSGSASGTDFTFTISSLQPEDIATYYCQQYDNLHVVTFGPGTKVDIK

SEQ ID NO: 646 - protein, 10 aa, Artificial Sequence
  Description of Artificial Sequence: Synthetic peptide
QQYDNLHVVT

SEQ ID NO: 647 - DNA, 358 bp, Artificial Sequence
  Description of Artificial Sequence: Synthetic polynucleotide
gaggtgcagctggtggagtctgggggaaggttggtacagcctggagggtccctgagactctcctgtgcagcctctggattcaccttcagtagttatgaaatgaactgggtccgccaggctccagggaaggggctggagtgggtttcattcattagtgatactagtagtgacatacactacgcagactctgtgaagggccgattcaccatctccagagacaacgccaagaactcagtgtatttgcaaatgaacagtctgagagccgcggacacggctctttattactgtgcgagaagtagagagaactacaatgtgtttgaccagtggggccagggaacccttgtcaccgtctcctcag

SEQ ID NO: 648 - protein, 119 aa, Artificial Sequence
  Description of Artificial Sequence: Synthetic polypeptide
EVQLVESGGRLVQPGGSLRLSCAASGFTFSSYEMNWVRQAPGKGLEWVSFISDTSSDIHYADSVKGRFTISRDNAKNSVYLQMNSLRAADTALYYCARSRENYNVFDQWGQGTLVTVSS

SEQ ID NO: 649 - protein, 12 aa, Artificial Sequence
  Description of Artificial Sequence: Synthetic peptide
ARSRENYNVFDQ

SEQ ID NO: 650 - DNA, 325 bp, Artificial Sequence
  Description of Artificial Sequence: Synthetic polynucleotide
gacatccagatgacccagtctccttccaccctgtctgcatctgtaggagacagagtcaccatcacttgccgggccagtcagagtattagtaggtggttggcctggtatcagcagaaaccagggaaagcccctaaactcctgatctataaggcgtctagttcagaaagtggggtcccatcaaggttcagcggcagtggatctgggacagaattcactctcaccatcagcagcctgcagcctgatgattttgcaacttattactgccaacagtataatacttattcccggatcaccttcggccaagggacacgactggagattaaac

SEQ ID NO: 651 - protein, 108 aa, Artificial Sequence
  Description of Artificial Sequence: Synthetic polypeptide
DIQMTQSPSTLSASVGDRVTITCRASQSISRWLAWYQQKPGKAPKLLIYKASSSESGVPSRFSGSGSGTEFTLTISSLQPDDFATYYCQQYNTYSRITFGQGTRLEIK

SEQ ID NO: 652 - protein, 10 aa, Artificial Sequence
  Description of Artificial Sequence: Synthetic peptide
QQYNTYSRIT

SEQ ID NO: 653 - DNA, 370 bp, Artificial Sequence
  Description of Artificial Sequence: Synthetic polynucleotide
gaggtgcagctgttggagtctgggggaggcttggtacagcctggggggtccctgagactctcctgtgcagcctctggattcacctttagtagttatggcatgagctgggtccgccaggtaccagggaaggggctggagtgggtctcaattattagtggtagcggtggtagcacatattacgcagactccgtgcagggccgcttcaccatctccagagacaattccaagaacacactgtctcttcaaatggacagcctgacagccgaggacacggccgtttattactgtgcgaaagataagattctgggcagcagcagctactattactttgaatactggggccggggaaccctggtcaccgtctcctcag

SEQ ID NO: 654 - protein, 123 aa, Artificial Sequence
  Description of Artificial Sequence: Synthetic polypeptide
EVQLLESGGGLVQPGGSLRLSCAASGFTFSSYGMSWVRQVPGKGLEWVSIISGSGGSTYYADSVQGRFTISRDNSKNTLSLQMDSLTAEDTAVYYCAKDKILGSSSYYYFEYWGRGTLVTVSS

SEQ ID NO: 655 - protein, 16 aa, Artificial Sequence
  Description of Artificial Sequence: Synthetic peptide
AKDKILGSSSYYYFEY

SEQ ID NO: 656 - DNA, 322 bp, Artificial Sequence
  Description of Artificial Sequence: Synthetic polynucleotide
gaaatagtgatgacgcagtctccagccaccctgtctgtgtctccaggggaaagagcctccctctcctgcagggccagtcagagtgttgccagcaacttagcctggtaccaacaaaaacctggccaggctcccaggctcctcatctatgatgcatccaccagggccactggcatcccagccaggttcagtggcagtgggtctgggacagagttcactctcaccatcagcagcctgcagtctgaagattttgcagtttattattgtcagcagtctaatcactggcctattaccttcggccaagggacacgactggagattaaac

SEQ ID NO: 657 - protein, 107 aa, Artificial Sequence
  Description of Artificial Sequence: Synthetic polypeptide
EIVMTQSPATLSVSPGERASLSCRASQSVASNLAWYQQKPGQAPRLLIYDASTRATGIPARFSGSGSGTEFTLTISSLQSEDFAVYYCQQSNHWPITFGQGTRLEIK

SEQ ID NO: 658 - protein, 9 aa, Artificial Sequence
  Description of Artificial Sequence: Synthetic peptide
QQSNHWPIT

SEQ ID NO: 659 - DNA, 346 bp, Artificial Sequence
  Description of Artificial Sequence: Synthetic polynucleotide
caggtccagcttgtgcagtctggggctgaggtgaagaggcctggggcctcggtgaagatttcctgcaggacttctgggtacaccttctctcactatgccattcactgggtgcgccaggcccccggacaaaggcctgagtggatgggatgggtcgacggtggcaagggaaacacaaaatattcgcagaagttcgaggggagagtcacctttaccagggacacatccgcgaccacagcctacatggaattgaccagcctgagatatgaagacacgggtgtatattactgtgcgagggcaggctggttcgacccttggggccagggaaccctggtcaccgtctcctcag

SEQ ID NO: 660 - protein, 115 aa, Artificial Sequence
  Description of Artificial Sequence: Synthetic polypeptide
QVQLVQSGAEVKRPGASVKISCRTSGYTFSHYAIHWVRQAPGQRPEWMGWVDGGKGNTKYSQKFEGRVTFTRDTSATTAYMELTSLRYEDTGVYYCARAGWFDPWGQGTLVTVSS

SEQ ID NO: 661 - protein, 8 aa, Artificial Sequence
  Description of Artificial Sequence: Synthetic peptide
ARAGWFDP

SEQ ID NO: 662 - DNA, 322 bp, Artificial Sequence
  Description of Artificial Sequence: Synthetic polynucleotide
gacatccagatgacccagtctccattctccctgtctgcatctgtaggagacagagtcaccatcacttgccaggcgagtcacgatattaggaattatttaaattggtatcaacaaaaaccagggaaagcccttatgctcctgatgtacgatgcatccgatttgaatacaggggtcccatcaaggttcagtggaagtggatctgggacagattttactctcaccatcagcagcctgcagagtgaagatgttgcaacatattactgtcaacagtatgataatctcgggtggacgttcggccaggggaccaaggtggaaatcaaac

SEQ ID NO: 663 - protein, 107 aa, Artificial Sequence
  Description of Artificial Sequence: Synthetic polypeptide
DIQMTQSPFSLSASVGDRVTITCQASHDIRNYLNWYQQKPGKALMLLMYDASDLNTGVPSRFSGSGSGTDFTLTISSLQSEDVATYYCQQYDNLGWTFGQGTKVEIK

SEQ ID NO: 664 - protein, 9 aa, Artificial Sequence
  Description of Artificial Sequence: Synthetic peptide
QQYDNLGWT

SEQ ID NO: 665 - DNA, 355 bp, Artificial Sequence
  Description of Artificial Sequence: Synthetic polynucleotide
caggtgcagctggtgcagtctgggactgaggtgaagaagcctgggtcctcggtgaaggtctcttgcagggcttctggaggcaccttcagcaactatgctatcagctgggtgcgacaggcccctggacaagggcttaagtggatgggagggatcatccctgtctgggcttcagcaacgtacgctcagatcttccagggcagactcacgattaccgcggacgaatccacgactacagcctacatggagttgagcagcctgagatctgaggacacgggcttttattactgtgcgagagaggggggaagtgggagctacgactactggggccagggaaccctggtcatcgtctcctcag

SEQ ID NO: 666 - protein, 118 aa, Artificial Sequence
  Description of Artificial Sequence: Synthetic polypeptide
QVQLVQSGTEVKKPGSSVKVSCRASGGTFSNYAISWVRQAPGQGLKWMGGIIPVWASATYAQIFQGRLTITADESTTTAYMELSSLRSEDTGFYYCAREGGSGSYDYWGQGTLVIVSS

SEQ ID NO: 667 - protein, 11 aa, Artificial Sequence
  Description of Artificial Sequence: Synthetic peptide
AREGGSGSYDY

SEQ ID NO: 668 - DNA, 336 bp, Artificial Sequence
  Description of Artificial Sequence: Synthetic polynucleotide
  modified_base (25)..(25): a, c, t, g, unknown or other
gatattgtgatgactcagtctccantctccctgcccgtcacccctggagagccggcctccatctcctgtaggtctagtcagagcctcctgcatagagatggatacaactatctggattggtacctgcagaggccagggcagtctccacagctcctgatctatttggcttctaatcgggcctccggggtccctgacaggttcagtggcagtggatcaggcacagattttacactgaaaatcagcagagtggaggctgaggatgttggggtttattactgcatgcaagctctgcgaactcctcgagcttttggccaggggaccaagctggagatcaaa

SEQ ID NO: 669 - protein, 112 aa, Artificial Sequence
  Description of Artificial Sequence: Synthetic polypeptide
  MOD_RES (9)..(9): Any amino acid
DIVMTQSPXSLPVTPGEPASISCRSSQSLLHRDGYNYLDWYLQRPGQSPQLLIYLASNRASGVPDRFSGSGSGTDFTLKISRVEAEDVGVYYCMQALRTPRAFGQGTKLEIK

SEQ ID NO: 670 - protein, 9 aa, Artificial Sequence
  Description of Artificial Sequence: Synthetic peptide
MQALRTPRA

SEQ ID NO: 671 - DNA, 355 bp, Artificial Sequence
  Description of Artificial Sequence: Synthetic polynucleotide
caggtgcagctggtgcagtctggggctgaggtgaagaagcctgggtcctcggtgaaggtgtcatgcaaggcttctggaggcaacttcaggaaccatgctgtcacctgggtgcgacaggcccctggacagaggctcgagtggatgggagacatcatccctgcctttggtacagcaagatatgcacagaagtttcagggcagggtcacgattagcgcggacgaatccacgagcacagcctatttgcaactgaacagtctgagatctgaggacacggccatgttttattgtgcgagagaggacggtttggggagttatgactcctggggccagggtaccctggtcatcgtctcctcag

SEQ ID NO: 672 - protein, 118 aa, Artificial Sequence
  Description of Artificial Sequence: Synthetic polypeptide
QVQLVQSGAEVKKPGSSVKVSCKASGGNFRNHAVTWVRQAPGQRLEWMGDIIPAFGTARYAQKFQGRVTISADESTSTAYLQLNSLRSEDTAMFYCAREDGLGSYDSWGQGTLVIVSS

SEQ ID NO: 673 - protein, 11 aa, Artificial Sequence
  Description of Artificial Sequence: Synthetic peptide
AREDGLGSYDS

SEQ ID NO: 674 - DNA, 337 bp, Artificial Sequence
  Description of Artificial Sequence: Synthetic polynucleotide
gatattgtgatgactcagtctccagtctccctgaccgtcacccctggagagccggcctccatctcctgcaggtctagtcagagcctcctccatagaagcggagacacctatttggattggtacctgcagaagccagggcagtctccacaactcctgatctatttgacttctaatcgggcctccggggtccctgacaggttcagtggcggtggatcaggcacagactttacactgaaaatcagcagagtggaggctggggatgttggagtttactactgcatgcaagctctacagactcctcgcacgttcggccaagggaccaggttggaaatcaaac

SEQ ID NO: 675 - protein, 112 aa, Artificial Sequence
  Description of Artificial Sequence: Synthetic polypeptide
DIVMTQSPVSLTVTPGEPASISCRSSQSLLHRSGDTYLDWYLQKPGQSPQLLIYLTSNRASGVPDRFSGGGSGTDFTLKISRVEAGDVGVYYCMQALQTPRTFGQGTRLEIK

SEQ ID NO: 676 - protein, 9 aa, Artificial Sequence
  Description of Artificial Sequence: Synthetic peptide
MQALQTPRT

SEQ ID NO: 677 - DNA, 384 bp, Artificial Sequence
  Description of Artificial Sequence: Synthetic polynucleotide
gaagtgcagctggtggagtctgggggaggcttggtacagcctggcaggtccctgagactgtcctgcgcagcctctggattcagctttgatgattttgccatgcactgggtccggcaagttccagggaagggcctggagtgggtctcaggtatcaattggcatagtggtatattagggtatgcggactctgtgaagggccgattcaccatctccagagacaacgccaagaactccctgtatttgcaaatgaacagtctgaggcgtgaggacagcgccttgtattactgtgtaagagatatggggtccggattggagatgccaaacaatctgcaattgatcgccatggacgtctggggccaagggactacagtcagtgtctcctca

SEQ ID NO: 678 - protein, 128 aa, Artificial Sequence
  Description of Artificial Sequence: Synthetic polypeptide
EVQLVESGGGLVQPGRSLRLSCAASGFSFDDFAMHWVRQVPGKGLEWVSGINWHSGILGYADSVKGRFTISRDNAKNSLYLQMNSLRREDSALYYCVRDMGSGLEMPNNLQLIAMDVWGQGTTVSVSS

SEQ ID NO: 679 - protein, 21 aa, Artificial Sequence
  Description of Artificial Sequence: Synthetic peptide
VRDMGSGLEMPNNLQLIAMDV

SEQ ID NO: 680 - DNA, 340 bp, Artificial Sequence
  Description of Artificial Sequence: Synthetic polynucleotide
  modified_base (43)..(43): a, c, t, g, unknown or other
gacatcgtgatgacccagtctccagactccctggctgtgtctntgggcgagggggcctccatcaagtgcaaggccagccagagcgttttgcacagcttcaacaataagaactacttagcttggtaccagcagaaaccaggacagcctcctatgttgctcatttactgggcatctgtccgggaatctggtgtccctgaccgattcagtggcagcgggtctgggacagatttcactctcaccatcaacggcctgcaggctgaagatgtggcagtttattactgtcagcaatattttagtactccactcactttcggcggagggaccaaggtggacatcaaac

SEQ ID NO: 681 - protein, 113 aa, Artificial Sequence
  Description of Artificial Sequence: Synthetic polypeptide
  MOD_RES (15)..(15): Any amino acid
DIVMTQSPDSLAVSXGEGASIKCKASQSVLHSFNNKNYLAWYQQKPGQPPMLLIYWASVRESGVPDRFSGSGSGTDFTLTINGLQAEDVAVYYCQQYFSTPLTFGGGTKVDIK

SEQ ID NO: 682 - protein, 9 aa, Artificial Sequence
  Description of Artificial Sequence: Synthetic peptide
QQYFSTPLT

SEQ ID NO: 683 - DNA, 376 bp, Artificial Sequence
  Description of Artificial Sequence: Synthetic polynucleotide
caggtgcagctggtggagtctgggggaggcttggtcaagcctggagggtccctgagactctcctgtgcagcctctggattcatcttcagtgactactacatgagttggatccgccaggctccagggaaggggctggagtgggtttcatacattagtagtagtggtagaagcatatattacgcagactctgtgaagggccgattcaccatctccagggacaacgccaagaacttgctgtatctgcgaatgaacagcctgagagccgaggacacggccgtctattactgtgcgagacaccccaaagaaggatacagttatggcgggggtaattggttcgatccctggggccagggaaccctggtcaccgtctcttcag

SEQ ID NO: 684 - protein, 125 aa, Artificial Sequence
  Description of Artificial Sequence: Synthetic polypeptide
QVQLVESGGGLVKPGGSLRLSCAASGFIFSDYYMSWIRQAPGKGLEWVSYISSSGRSIYYADSVKGRFTISRDNAKNLLYLRMNSLRAEDTAVYYCARHPKEGYSYGGGNWFDPWGQGTLVTVSS

SEQ ID NO: 685 - protein, 18 aa, Artificial Sequence
  Description of Artificial Sequence: Synthetic peptide
ARHPKEGYSYGGGNWFDP

SEQ ID NO: 686 - DNA, 321 bp, Artificial Sequence
  Description of Artificial Sequence: Synthetic polynucleotide
gacatccagatgacccagtctccttccaccctgtctgcatctgtaggagacagagtcaccatcacttgccgggccagtcagagtattagtagttggttggcctggtatcagcagaaaccagggaaagcccctaaactcctgatctacaaggcgtctagtttagaaagtggggtcccatcaagatttagcggcagtggatctgggacagaattcactctcaccatcagcagcctgcagcctgatgattttgcaacttattactgccaacagtataatagttattctccgtacacttttggccaggggaccaagctggagatc

SEQ ID NO: 687 - protein, 107 aa, Artificial Sequence
  Description of Artificial Sequence: Synthetic polypeptide
DIQMTQSPSTLSASVGDRVTITCRASQSISSWLAWYQQKPGKAPKLLIYKASSLESGVPSRFSGSGSGTEFTLTISSLQPDDFATYYCQQYNSYSPYTFGQGTKLEI

SEQ ID NO: 688 - protein, 10 aa, Artificial Sequence
  Description of Artificial Sequence: Synthetic peptide
QQYNSYSPYT

SEQ ID NO: 689 - DNA, 356 bp, Artificial Sequence
  Description of Artificial Sequence: Synthetic polynucleotide
caggtgcagctggtgcagtctggggctgaggtgaagaagcctgggtcctcggtgaaggtctcctgcaaggcttctggaggcaccttaagtacttatactgtcagttgggtgcgacaggcccctggacgagggcttgaatggatgggagggatcatccctgtctttggaacagcgaactacgcacagaggttccagggcagagtcacgattagtgcggacgaatccacgagcaccgtctacatggaactgaggagcctgaaatctgaggacacggccgtgtattattgtgcgagagatggtggagcagtggctggttacgcctactggggccagggaaccctggtcaccgtctcctc

SEQ ID NO: 690 - protein, 118 aa, Artificial Sequence
  Description of Artificial Sequence: Synthetic polypeptide
QVQLVQSGAEVKKPGSSVKVSCKASGGTLSTYTVSWVRQAPGRGLEWMGGIIPVFGTANYAQRFQGRVTISADESTSTVYMELRSLKSEDTAVYYCARDGGAVAGYAYWGQGTLVTVS

SEQ ID NO: 691 - protein, 12 aa, Artificial Sequence
  Description of Artificial Sequence: Synthetic peptide
ARDGGAVAGYAY

SEQ ID NO: 692 - DNA, 325 bp, Artificial Sequence
  Description of Artificial Sequence: Synthetic polynucleotide
gacatccagatgacccagtctccatcctccctgtctgcatctgtaggagacagagtcaccatcacttgccaggcgagtcaggacattaataactatgtaaattggtatcagcagaaaccaggaaaagcccctaatctcctgatctacgatgcatccaatttggaaacaggggtcccatcaaggttcagtggcagtgggtctgggacatattttactttcaccatcagcagcctacagcctgaagatgttgcaacatattactgtcaacagtatgctaatctccatgcgctcactttcggcggagggaccagggtggagatcaaac

SEQ ID NO: 693 - protein, 108 aa, Artificial Sequence
  Description of Artificial Sequence: Synthetic polypeptide
DIQMTQSPSSLSASVGDRVTITCQASQDINNYVNWYQQKPGKAPNLLIYDASNLETGVPSRFSGSGSGTYFTFTISSLQPEDVATYYCQQYANLHALTFGGGTRVEIK

SEQ ID NO: 694 - protein, 10 aa, Artificial Sequence
  Description of Artificial Sequence: Synthetic peptide
QQYANLHALT

SEQ ID NO: 695 - DNA, 355 bp, Artificial Sequence
  Description of Artificial Sequence: Synthetic polynucleotide
caggtccagctggtgcagtctggggctgaggtgaagaagcctgggtcctcggtgaaggtctcctgtaaggcctctggaggccccttcaacaactatgctatcacctgggtgcgacaggcccctggacaagggcttcagtggatgggaaggatcatccctgcctttggttcagcaaactacgcacagaagttccagggcagggtcaccattaccgcggacgaatccacgagcacagtctacatggaggtgagcagcctgagatctgacgacacggccgtgtattactgcgcgcgatcgtccggttatttggacgttgaccagtggggccagggaaccctgatcaccgtctcctcag

SEQ ID NO: 696 - protein, 118 aa, Artificial Sequence
  Description of Artificial Sequence: Synthetic polypeptide
QVQLVQSGAEVKKPGSSVKVSCKASGGPFNNYAITWVRQAPGQGLQWMGRIIPAFGSANYAQKFQGRVTITADESTSTVYMEVSSLRSDDTAVYYCARSSGYLDVDQWGQGTLITVSS

SEQ ID NO: 697 - protein, 11 aa, Artificial Sequence
  Description of Artificial Sequence: Synthetic peptide
ARSSGYLDVDQ

SEQ ID NO: 698 - DNA, 337 bp, Artificial Sequence
  Description of Artificial Sequence: Synthetic polynucleotide
gatattgtgatgacccagactccactctctctgtccgtcacccctgggcagccggcctccatgtcctgcaagtcaagtcagagcctcctgcatcgtgatggaaagacctatttgtattggttcctgcaaaagccaggccagcctccacagctcctgatctatgaagtttcccaccggttctctggagtgccagataggttcagtggcagcgggtcagggacagatttcacgttgaaaatcagccgggtggaggctgaggatgttggggtttattactgcatgcaaaatatacggcttcctctcactttcggcggagggaccaggttggagatcaaac

SEQ ID NO: 699 - protein, 112 aa, Artificial Sequence
  Description of Artificial Sequence: Synthetic polypeptide
DIVMTQTPLSLSVTPGQPASMSCKSSQSLLHRDGKTYLYWFLQKPGQPPQLLIYEVSHRFSGVPDRFSGSGSGTDFTLKISRVEAEDVGVYYCMQNIRLPLTFGGGTRLEIK

SEQ ID NO: 700 - protein, 9 aa, Artificial Sequence
  Description of Artificial Sequence: Synthetic peptide
MQNIRLPLT

SEQ ID NO: 701 - DNA, 347 bp, Artificial Sequence
  Description of Artificial Sequence: Synthetic polynucleotide
caggtgcagctggtgcagtctggggctgaggtgaagaagcctgggtcctcggtgaaggtctcctgcaaggcttctggaggcaccttcagcaactatgctatcacctgggtgcgacaggcccctggacaagggcttgagtggatgggagagatcatccctgtctttggaacaccaaagtatgcacagaagttccagggcagagtcacgataaccgcggacgaatccacgagcacagcctacatggagatgagcagcctgagatctgaggacacggccgtatattactgcgcgagaggtgtttggggccttgactactggggccagggaaccctggtcaccgtctcctc

SEQ ID NO: 702 - protein, 115 aa, Artificial Sequence
  Description of Artificial Sequence: Synthetic polypeptide
QVQLVQSGAEVKKPGSSVKVSCKASGGTFSNYAITWVRQAPGQGLEWMGEIIPVFGTPKYAQKFQGRVTITADESTSTAYMEMSSLRSEDTAVYYCARGVWGLDYWGQGTLVTVS

SEQ ID NO: 703 - protein, 9 aa, Artificial Sequence
  Description of Artificial Sequence: Synthetic peptide
ARGVWGLDY

SEQ ID NO: 704 - DNA, 322 bp, Artificial Sequence
  Description of Artificial Sequence: Synthetic polynucleotide
gacatccagatgacccagtctccttccaccctgtctgcatctgtaggagacagagtcaccatcacttgccgggccagtcagagtattagtagctggttggcctggtatcagcagaaaccagggaaagcccctaagctcctgatctataaggcgtctagtttagaaagtggggtcccatcaaggttcagcggcagtggatctgggacagaattcactctcaccatcagcagcctgcagcctgatgattttgcaacttattactgccaacagtataatagttaccccctcactttcggcggagggaccaaggtggagatcaaac

SEQ ID NO: 705 - protein, 107 aa, Artificial Sequence
  Description of Artificial Sequence: Synthetic polypeptide
DIQMTQSPSTLSASVGDRVTITCRASQSISSWLAWYQQKPGKAPKLLIYKASSLESGVPSRFSGSGSGTEFTLTISSLQPDDFATYYCQQYNSYPLTFGGGTKVEIK

SEQ ID NO: 706 - protein, 9 aa, Artificial Sequence
  Description of Artificial Sequence: Synthetic peptide
QQYNSYPLT

SEQ ID NO: 707 - DNA, 355 bp, Artificial Sequence
  Description of Artificial Sequence: Synthetic polynucleotide
caggtgcagctggtgcagtctggggctgaggtgaagaagcctgggtcctcggtgaaagtctcctgcaaggcttctggaggcacctttagcaactatgctatcgactgggtgcgacaggcccctggacaagggcttgagtggatgggacggatcatccctgtctttggcacaccaaattacgctaagaagttccagggcagagccacgattaccgcggacgagtccgcgagtacagcctacatggaactgagcagcctgagatctgaggacacggccgtcttctattgtgcgagagtggggggtttggggagttatgacgactggggccagggaaccctggtcaccgtctcctcag

SEQ ID NO: 708 - protein, 118 aa, Artificial Sequence
  Description of Artificial Sequence: Synthetic polypeptide
QVQLVQSGAEVKKPGSSVKVSCKASGGTFSNYAIDWVRQAPGQGLEWMGRIIPVFGTPNYAKKFQGRATITADESASTAYMELSSLRSEDTAVFYCARVGGLGSYDDWGQGTLVTVSS

SEQ ID NO: 709 - protein, 11 aa, Artificial Sequence
  Description of Artificial Sequence: Synthetic peptide
ARVGGLGSYDD

SEQ ID NO: 710 - DNA, 337 bp, Artificial Sequence
  Description of Artificial Sequence: Synthetic polynucleotide
  modified_base (40)..(40): a, c, t, g, unknown or other
gatattgtgatgactcagtctccactctccctgcccgtcncccctggagagccagcctccatctcctgcaggtctagtcagagcctcctgcatcgtgatgggaacaactatttggattggtacctgcagaagccagggcagtctccacagctcctgatctatttgggttctaatcgggcctccggagtccctgacaggttcagtggcagtggatcaggcacagattttacactgaaaatcagcagagtggaggctgaggatgttggagtttattattgcatgcaagctctacaaattcctaacacttttggccaggggaccaagctggaaatcaaac

SEQ ID NO: 711 - protein, 112 aa, Artificial Sequence
  Description of Artificial Sequence: Synthetic polypeptide
  MOD_RES (14)..(14): Any amino acid
DIVMTQSPLSLPVXPGEPASISCRSSQSLLHRDGNNYLDWYLQKPGQSPQLLIYLGSNRASGVPDRFSGSGSGTDFTLKISRVEAEDVGVYYCMQALQIPNTFGQGTKLEIK

SEQ ID NO: 712 - protein, 9 aa, Artificial Sequence
  Description of Artificial Sequence: Synthetic peptide
MQALQIPNT

SEQ ID NO: 713 - DNA, 353 bp, Artificial Sequence
  Description of Artificial Sequence: Synthetic polynucleotide
caggtgcagctggtgcagtctggggctgaggtgaggaagcctgggtcctcggtgaaggtctcctgcaagacttctggaggcgccttcagcaactatggtgtcaattgggtgcgacaggcccctggacaaggtcttgagtggatgggatatatcatccctgtctttgctacaccaagctacgcacagaagttccagggcagagtcaccattaccgcggacggatccacgtccacagcctacatggagctgagcggcctgagatctgaggacacggccatatattactgtgcgagagacgcgggagctaccatccttgattactggggccagggaaccctgatcaccgtctcctc

SEQ ID NO: 714 - protein, 117 aa, Artificial Sequence
  Description of Artificial Sequence: Synthetic polypeptide
QVQLVQSGAEVRKPGSSVKVSCKTSGGAFSNYGVNWVRQAPGQGLEWMGYIIPVFATPSYAQKFQGRVTITADGSTSTAYMELSGLRSEDTAIYYCARDAGATILDYWGQGTLITVS

SEQ ID NO: 715 - protein, 11 aa, Artificial Sequence
  Description of Artificial Sequence: Synthetic peptide
ARDAGATILDY

SEQ ID NO: 716 - DNA, 322 bp, Artificial Sequence
  Description of Artificial Sequence: Synthetic polynucleotide
gacatccagatgacccagtctccatcctccctgtctgcatctgtaggagacagagtcaccatcacttgccgggcaagtcagggcattagaaatgatttaggctggtatcagcagaaagcagggaaagcccctaagcgcctgatctatgctgcatccagtttggaaagtggggtcccatcaaggttcagcggcagtggatctgggacagaattcactctcacaatcagcagcctgcagcctgaagattttgcaacttattactgtctacagcataatcgttaccctctaactttcggcggagggaccaaggtggagatcaaac

SEQ ID NO: 717 - protein, 107 aa, Artificial Sequence
  Description of Artificial Sequence: Synthetic polypeptide
DIQMTQSPSSLSASVGDRVTITCRASQGIRNDLGWYQQKAGKAPKRLIYAASSLESGVPSRFSGSGSGTEFTLTISSLQPEDFATYYCLQHNRYPLTFGGGTKVEIK

SEQ ID NO: 718 - protein, 9 aa, Artificial Sequence
  Description of Artificial Sequence: Synthetic peptide
LQHNRYPLT

SEQ ID NO: 719 - DNA, 399 bp, Artificial Sequence
  Description of Artificial Sequence: Synthetic polynucleotide
caggtgcagctgcaggagtcgggcccagggctggtgaagccttcacagaccctgtccctcacctgcactgtctctggtggctccatcagcaatggtgatcactactggaattggatccgccagcccccagggaagggcctggagtggattgggtacatccattacagtgggaacgcctactacaacccgtccctcaagggtcgagttaccatatcaatagacacgtccaagaatcagttctccctgaatttgaactctgtgactgccgcagacacggccgtgtattactgtgccagagacttgtattcccgtgatactagtggttactacgcggcagattattatcactactacggtacggacgtctggggccaaggggccacggtcaccgtctcctca

SEQ ID NO: 720 - protein, 133 aa, Artificial Sequence
  Description of Artificial Sequence: Synthetic polypeptide
QVQLQESGPGLVKPSQTLSLTCTVSGGSISNGDHYWNWIRQPPGKGLEWIGYIHYSGNAYYNPSLKGRVTISIDTSKNQFSLNLNSVTAADTAVYYCARDLYSRDTSGYYAADYYHYYGTDVWGQGATVTVSS

SEQ ID NO: 721 - protein, 25 aa, Artificial Sequence
  Description of Artificial Sequence: Synthetic peptide
ARDLYSRDTSGYYAADYYHYYGTDV

SEQ ID NO: 722 - DNA, 322 bp, Artificial Sequence
  Description of Artificial Sequence: Synthetic polynucleotide
gacatccagatgacccagtctccatcctccctgtctgcatctataggagacagagtcaccatcacttgccgggcaagtcagagcattagcacctatttaaattggcttcagcagaaaccagggaaagcccctaaactcctgatctatgctgcatccagtttgcacagtggggccccatcaaggttcagtggcactggatctgggacagatttcactctcaccatcagcagcctgcaacgtgaagattttgcaactttctactgtcaacagacttacactaccccccgcacttttggccaggggaccaaggtggagatcaaac

SEQ ID NO: 723 - protein, 107 aa, Artificial Sequence
  Description of Artificial Sequence: Synthetic polypeptide
DIQMTQSPSSLSASIGDRVTITCRASQSISTYLNWLQQKPGKAPKLLIYAASSLHSGAPSRFSGTGSGTDFTLTISSLQREDFATFYCQQTYTTPRTFGQGTKVEIK

SEQ ID NO: 724 - protein, 9 aa, Artificial Sequence
  Description of Artificial Sequence: Synthetic peptide
QQTYTTPRT

SEQ ID NO: 725 - DNA, 352 bp, Artificial Sequence
  Description of Artificial Sequence: Synthetic polynucleotide
caggtccagctggtgcagtctggggctcaggtgaagaagcctgggtcctcggtgaaggtctcctgcaaggctactggaggctccttcagcaactatgccatcaactgggtgcgacaggcccctggacaaggccttgaatggatggggatggtcatccctgtctttgggacaccaaattacgcacagaacttccggggcagagtcacaattaccgcggacgagtccacgagcacagcctacatggaactgagcagcctgagatctgacgacacggccgtatattactgtgtgagagattctttcgagccactctgctattggggccagggaaccctggtcaccgtctcttcag

SEQ ID NO: 726 - protein, 117 aa, Artificial Sequence
  Description of Artificial Sequence: Synthetic polypeptide
QVQLVQSGAQVKKPGSSVKVSCKATGGSFSNYAINWVRQAPGQGLEWMGMVIPVFGTPNYAQNFRGRVTITADESTSTAYMELSSLRSDDTAVYYCVRDSFEPLCYWGQGTLVTVSS

SEQ ID NO: 727 - protein, 10 aa, Artificial Sequence
  Description of Artificial Sequence: Synthetic peptide
VRDSFEPLCY

SEQ ID NO: 728 - DNA, 337 bp, Artificial Sequence
  Description of Artificial Sequence: Synthetic polynucleotide
  modified_base (40)..(40): a, c, t, g, unknown or other
gatattgtgatgactcagtctccactctccctgcccgtcncccctggagagccggcctccatctcctgcaggtctagtcagagtctcctgcatcgtgatggagacaaatatttggcttggtacctgcagaagccagggcagtctccacaactcctgatctatttggcttctaatcgggcctccggggtccctgacaggttcagtggcagtggaacaggcactgattttacactgaaaatcagcagagtggaggctgaggatgttggggtttattactgcatgcaagctctccgagcaccgtacacgtttggccaggggaccaggctggagatcaaac

SEQ ID NO: 729 - protein, 112 aa, Artificial Sequence
  Description of Artificial Sequence: Synthetic polypeptide
  MOD_RES (14)..(14): Any amino acid
DIVMTQSPLSLPVXPGEPASISCRSSQSLLHRDGDKYLAWYLQKPGQSPQLLIYLASNRASGVPDRFSGSGTGTDFTLKISRVEAEDVGVYYCMQALRAPYTFGQGTRLEIK

SEQ ID NO: 730 - protein, 9 aa, Artificial Sequence
  Description of Artificial Sequence: Synthetic peptide
MQALRAPYT

SEQ ID NO: 731 - DNA, 355 bp, Artificial Sequence
  Description of Artificial Sequence: Synthetic polynucleotide
caggtgcagctggtgcagtctggggctgaggtgaagaagcctgggtcctcggtgaaggtctcctgcaaggcttctggaggcaccttcagtcattttgctatcagctggatacgacaggcccctggacaagggcttgagtggatgggagggatcatccccatctttggcacaggaaactacgcacagaagttcaagggcagagtcaccattaccgcggacgaatccacgagcacagtctacctggagctgagcagcctgagatatgaagacacggccgtttattactgtgcgagagatgactctagcgggagttacggctactggggccagggaaccctggtcaccgtctcttcag

SEQ ID NO: 732 - protein, 118 aa, Artificial Sequence
  Description of Artificial Sequence: Synthetic polypeptide
QVQLVQSGAEVKKPGSSVKVSCKASGGTFSHFAISWIRQAPGQGLEWMGGIIPIFGTGNYAQKFKGRVTITADESTSTVYLELSSLRYEDTAVYYCARDDSSGSYGYWGQGTLVTVSS

SEQ ID NO: 733 - protein, 11 aa, Artificial Sequence
  Description of Artificial Sequence: Synthetic peptide
ARDDSSGSYGY

SEQ ID NO: 734 - DNA, 322 bp, Artificial Sequence
  Description of Artificial Sequence: Synthetic polynucleotide
gacatccagatgacccagtctccatcctccctgtctgcatctgtaggagacagagtcaccatcacttgccgggcaagtcagagcattagcagctatttaaattggtatcagcagaaaccagggaaagcccctaagctcctgatctatgctgcatccagtttgcaaagtggggtcccatcaaggttcagtggcagtggatctgggacagatttcactctcaccatcagcagtctgcaacctgaagattttgcaacttactactgtcaacagagttacagtacccctcgaacgttcggccaagggaccaaggtggaaatcaaac

SEQ ID NO: 735 - protein, 107 aa, Artificial Sequence
  Description of Artificial Sequence: Synthetic polypeptide
DIQMTQSPSSLSASVGDRVTITCRASQSISSYLNWYQQKPGKAPKLLIYAASSLQSGVPSRFSGSGSGTDFTLTISSLQPEDFATYYCQQSYSTPRTFGQGTKVEIK

SEQ ID NO: 736 - protein, 9 aa, Artificial Sequence
  Description of Artificial Sequence: Synthetic peptide
QQSYSTPRT

SEQ ID NO: 737 - DNA, 378 bp, Artificial Sequence
  Description of Artificial Sequence: Synthetic polynucleotide
caggtgcagctggtgcagtctggggctgaggtgaagaggcctgggtcctcggtgaaggtctcctgcaaggcttctggaggcaccttcaacagctatgctatcaactgggtgcgacaggtccctggacaggggcttgagtggatgggagggatcatccctaattttgatacaacaaattacgcacagaagttccagggcagactcaagattaccgcggacaaatccacgaccacagcctacatggaactgagcagcctgaaatctgaagacacggccgtgtattactgtgcgaaagacggtagagatgggcacagttgggcgaactactactactacatggacgtctggggcagagggaccacggtcatcgtctcctca

SEQ ID NO: 738 - protein, 126 aa, Artificial Sequence
  Description of Artificial Sequence: Synthetic polypeptide
QVQLVQSGAEVKRPGSSVKVSCKASGGTFNSYAINWVRQVPGQGLEWMGGIIPNFDTTNYAQKFQGRLKITADKSTTTAYMELSSLKSEDTAVYYCAKDGRDGHSWANYYYYMDVWGRGTTVIVSS

SEQ ID NO: 739 - protein, 19 aa, Artificial Sequence
  Description of Artificial Sequence: Synthetic peptide
AKDGRDGHSWANYYYYMDV

SEQ ID NO: 740 - DNA, 316 bp, Artificial Sequence
  Description of Artificial Sequence: Synthetic polynucleotide
gaaattgtgttgacacagtctccagccaccctgtctttgtctcccggggaaagagccaccctctcctgcagggccagtcagagtgttagcgactacttggcctggtaccagcagaaacctggccagcctcccaggctcctcatctatgatgcatccaacagggccactggcgtcccagcccggttcagtggcagtgggtctgggacagacttcactctcaccatcagcagcctagagcctgaagattttgcggtttattactgtcaacagcgtagcacctggccggggaccttcggccctgggaccaaagtggata

SEQ ID NO: 741 - protein, 105 aa, Artificial Sequence
  Description of Artificial Sequence: Synthetic polypeptide
EIVLTQSPATLSLSPGERATLSCRASQSVSDYLAWYQQKPGQPPRLLIYDASNRATGVPARFSGSGSGTDFTLTISSLEPEDFAVYYCQQRSTWPGTFGPGTKVD

SEQ ID NO: 742 - protein, 9 aa, Artificial Sequence
  Description of Artificial Sequence: Synthetic peptide
QQRSTWPGT

SEQ ID NO: 743 - DNA, 361 bp, Artificial Sequence
  Description of Artificial Sequence: Synthetic polynucleotide
caggtgcagctggtgcagtctggggctgaggtgaagaagcctggggcctcagtgaaggtgtcctgcaaggcatctggatacaccttcaccagctactatatgcactgggtgcgacaggcccctggacaagggcttgagtggatgggaataatcaaccctagtggtggtagcacaagctacgcacagaagctccagggcagagtcaccatgaccagggacacgtccacgagcacagcctacatggagctgagcagcctgagatctgaggacacggccgtgtattactgtgcgagagtagggtccgtcccggggtggcagtgggtctactggggccagggaaccctggtcaccgtctcctcag

SEQ ID NO: 744 - protein, 120 aa, Artificial Sequence
  Description of Artificial Sequence: Synthetic polypeptide
QVQLVQSGAEVKKPGASVKVSCKASGYTFTSYYMHWVRQAPGQGLEWMGIINPSGGSTSYAQKLQGRVTMTRDTSTSTAYMELSSLRSEDTAVYYCARVGSVPGWQWVYWGQGTLVTVSS

SEQ ID NO: 745 - protein, 13 aa, Artificial Sequence
  Description of Artificial Sequence: Synthetic peptide
ARVGSVPGWQWVY

SEQ ID NO: 746 - DNA, 310 bp, Artificial Sequence
  Description of Artificial Sequence: Synthetic polynucleotide
gacatccagatgacccagtctccttccaccctgtctgcatctgtaggagacagagtcaccatcacttgccgggccagtcagagtattagtagctggttggcctggtaccagcagaaaccagggaaagcccctaagctcctgatctataaggcgtctagtttagaaagtggggtcccatcaaggttcagcggcagtggatctgggacagaattcactctcaccatcagcagcctgcagcctgatgattttggaacttattactgccaacagtatgggacgttcggccaagggaccaaggtggaaatcaaac

SEQ ID NO: 747 - protein, 103 aa, Artificial Sequence
  Description of Artificial Sequence: Synthetic polypeptide
DIQMTQSPSTLSASVGDRVTITCRASQSISSWLAWYQQKPGKAPKLLIYKASSLESGVPSRFSGSGSGTEFTLTISSLQPDDFGTYYCQQYGTFGQGTKVEIK

SEQ ID NO: 748 - protein, 5 aa, Artificial Sequence
  Description of Artificial Sequence: Synthetic peptide
QQYGT

SEQ ID NO: 749 - DNA, 352 bp, Artificial Sequence
  Description of Artificial Sequence: Synthetic polynucleotide
caggtgcagctgcaggagtcgggcccaggactggtgaagccctcggggaccctgtccctcacctgcggtgtctctggtggctccatcatcagtagtcactggtggggttgggtccgccagcccccagggaaggggctggagtggattggagagatctttcatactgggatcacgaactataacccgtcgctcaagagtcgagtgaccgtctctgtagacacgtccaacaaccggttctccctgaaactgaagtctgtgaccgccgcggacacggccgtctattactgtgcgagagtgggacgtggttccctgcccttctggggcaagggagccctggtcatcgtctcctcag

SEQ ID NO: 750 - protein, 117 aa, Artificial Sequence
  Description of Artificial Sequence: Synthetic polypeptide
QVQLQESGPGLVKPSGTLSLTCGVSGGSIISSHWWGWVRQPPGKGLEWIGEIFHTGITNYNPSLKSRVTVSVDTSNNRFSLKLKSVTAADTAVYYCARVGRGSLPFWGKGALVIVSS

SEQ ID NO: 751 - protein, 10 aa, Artificial Sequence
  Description of Artificial Sequence: Synthetic peptide
ARVGRGSLPF

SEQ ID NO: 752 - DNA, 337 bp, Artificial Sequence
  Description of Artificial Sequence: Synthetic polynucleotide
  modified_base (40)..(40): a, c, t, g, unknown or other
gatattgtgatgactcagtctccactctccctgcccgtcncccctggagagccggcctccatctcctgcaggtctagtgagagtctccagtataacaatggattcaactatgtggattggtacttgcagaagccggggcagtctccacaactcctgatctttatgggctctaatcgggcctccggcgtccctgacaggttcagtggcagtgcttcaggcacagattttacactgaaaatcagcagagtggaggctgaggattttggggtttattactgcatgcaagctctagaacctccgtacacttttggccaggggaccaagctggagatcaaac

SEQ ID NO: 753 - protein, 112 aa, Artificial Sequence
  Description of Artificial Sequence: Synthetic polypeptide
  MOD_RES (14)..(14): Any amino acid
DIVMTQSPLSLPVXPGEPASISCRSSESLQYNNGFNYVDWYLQKPGQSPQLLIFMGSNRASGVPDRFSGSASGTDFTLKISRVEAEDFGVYYCMQALEPPYTFGQGTKLEIK

SEQ ID NO: 754 - protein, 9 aa, Artificial Sequence
  Description of Artificial Sequence: Synthetic peptide
MQALEPPYT

SEQ ID NO: 755 - DNA, 358 bp, Artificial Sequence
  Description of Artificial Sequence: Synthetic polynucleotide
gaggtgcagctggtggagtctgggggacgcttagtacagcctggagggtccctgagactctcctgtgcagcctctggattcattttcagtaattatgaaatgaactgggtccgccaggctccaggaaaggggctcgagtggctttcatacattagtgacagtggtagtgacatatattacgcaggctctgtgcagggccgattcaccatctccagagacaacgccaagaattcattgtatctggagattagcagtctgagagccgaggacacggctgtttattactgtgcgagagcaagagatcactacaatttgtttgactactggggccagggaaccctggtcatcgtctcctcag

SEQ ID NO: 756 - protein, 119 aa, Artificial Sequence
  Description of Artificial Sequence: Synthetic polypeptide
EVQLVESGGRLVQPGGSLRLSCAASGFIFSNYEMNWVRQAPGKGLEWLSYISDSGSDIYYAGSVQGRFTISRDNAKNSLYLEISSLRAEDTAVYYCARARDHYNLFDYWGQGTLVIVSS

SEQ ID NO: 757 - protein, 12 aa, Artificial Sequence
  Description of Artificial Sequence: Synthetic peptide
ARARDHYNLFDY

SEQ ID NO: 758 - DNA, 325 bp, Artificial Sequence
  Description of Artificial Sequence: Synthetic polynucleotide
gacatccagatgacccagtctccttccaccctgtctgcatctgtgggagacagagtcaccatcacttgtcgggccagtcagtatattagtaagtggttggcctggtatcagcagaaaccagggaaagcccctaaactcctgatctataaggcgtcttctttagaaagtggggtctcatcaaggttcagcggcagtggatctgggacagagttcactctcaccatcagcagcctgcagcctgatgattctgcaacttattactgccagcaatataatactttttcccggatcaccttcggccaagggacacgactggagattaaac

SEQ ID NO: 759 - protein, 108 aa, Artificial Sequence
  Description of Artificial Sequence: Synthetic polypeptide
DIQMTQSPSTLSASVGDRVTITCRASQYISKWLAWYQQKPGKAPKLLIYKASSLESGVSSRFSGSGSGTEFTLTISSLQPDDSATYYCQQYNTFSRITFGQGTRLEIK

SEQ ID NO: 760 - protein, 10 aa, Artificial Sequence
  Description of Artificial Sequence: Synthetic peptide
QQYNTFSRIT

SEQ ID NO: 761 - DNA, 355 bp, Artificial Sequence
  Description of Artificial Sequence: Synthetic polynucleotide
caggtgcagctggtgcagtctggggctgaggtgaagaagcctgggtcctcggtgaaggtctcctgcaaggcttctggaggcaccttcagcaactatattgtcagttgggtgcgacaggcccctggacaagggcttgagtggatgggagggagcatccctatctttggtacagcaaagttcgcccagaacttccagggcagactcacgattactgcggacgaacataccaacacagcctacatggagctgagcagcctgagatctgaggacacggccgtttactactgtgcgagagggatgggagctactggaggtgactactggggccagggaaccctggtcaccgtctcctcag

SEQ ID NO: 762 - protein, 118 aa, Artificial Sequence
  Description of Artificial Sequence: Synthetic polypeptide
QVQLVQSGAEVKKPGSSVKVSCKASGGTFSNYIVSWVRQAPGQGLEWMGGSIPIFGTAKFAQNFQGRLTITADEHTNTAYMELSSLRSEDTAVYYCARGMGATGGDYWGQGTLVTVSS

SEQ ID NO: 763 - protein, 11 aa, Artificial Sequence
  Description of Artificial Sequence: Synthetic peptide
ARGMGATGGDY

SEQ ID NO: 764 - DNA, 319 bp, Artificial Sequence
  Description of Artificial Sequence: Synthetic polynucleotide
gacatccagatgacccagtctccatcctccctgtctgcatctgtaggagacagagtcaccatcacttgccaggcgagtcaagacattagcaactatttaaattggtatcagcagaaaccagggaaagcccctaagctcctgatcttcgatgcatccaatttggagacaggggtcccatcaaggttcagtggaagtggctctgggacagattttactttcatcatcagcagcctgcagcctgaagatattgcaacatattactgtcaacagtatgatagtctctcacggacgttcggccaagggaccaaggtggaaatca

SEQ ID NO: 765 - protein, 106 aa, Artificial Sequence
  Description of Artificial Sequence: Synthetic polypeptide
DIQMTQSPSSLSASVGDRVTITCQASQDISNYLNWYQQKPGKAPKLLIFDASNLETGVPSRFSGSGSGTDFTFIISSLQPEDIATYYCQQYDSLSRTFGQGTKVEI

SEQ ID NO: 766 - protein, 9 aa, Artificial Sequence
  Description of Artificial Sequence: Synthetic peptide
QQYDSLSRT

SEQ ID NO: 767 - DNA, 364 bp, Artificial Sequence
  Description of Artificial Sequence: Synthetic polynucleotide
gaggtgcagctggtggagtctgggggaggcttggttcagcctggggggtccctgagactctcctgtgtagcctctggattcaccttcagtggttatgacatgaactggatccgccaggctccaggaaaggggctggagtggctttcgtacattagtaatagaggtgacaccatatactacgcagactctgtgaggggccgattcaccatttccagagacaacgccaagaactcgctgcatcttcaaatcaacaacctgagagccgaggacacggctttttattactgtgcgagagaacgatattatgacgcgtacaactggttcgacccctggggccagggaaccctggtcactgtctcctcag

SEQ ID NO: 768 - protein, 121 aa, Artificial Sequence
  Description of Artificial Sequence: Synthetic polypeptide
EVQLVESGGGLVQPGGSLRLSCVASGFTFSGYDMNWIRQAPGKGLEWLSYISNRGDTIYYADSVRGRFTISRDNAKNSLHLQINNLRAEDTAFYYCARERYYDAYNWFDPWGQGTLVTVSS

SEQ ID NO: 769 - protein, 14 aa, Artificial Sequence
  Description of Artificial Sequence: Synthetic peptide
ARERYYDAYNWFDP

SEQ ID NO: 770 - DNA, 325 bp, Artificial Sequence
  Description of Artificial Sequence: Synthetic polynucleotide
gacatccagttgacccagtctccatccttcctgtctgcatctgtaggagacagagtcaccatcacttgccgggccagtcagggcattagcaggtatttagcctggtatcaacaaaaaccagggaaagcccctaaggtcctgatctatgctgcatccattttgcaaagtggggtcccgtcaaggttcagcggcagtggatctgggacagaattcactctcacaatcagcagcctgcagccggaggatcttgcaacttattactgtcaacagcttaatagttccccgatgtacacttttggccaggggaccaagctggagatcaaac

SEQ ID NO: 771 - protein, 108 aa, Artificial Sequence
  Description of Artificial Sequence: Synthetic polypeptide
DIQLTQSPSFLSASVGDRVTITCRASQGISRYLAWYQQKPGKAPKVLIYAASILQSGVPSRFSGSGSGTEFTLTISSLQPEDLATYYCQQLNSSPMYTFGQGTKLEIK

SEQ ID NO: 772 - protein, 10 aa, Artificial Sequence
  Description of Artificial Sequence: Synthetic peptide
QQLNSSPMYT

SEQ ID NO: 773 - DNA, 358 bp, Artificial Sequence
  Description of Artificial Sequence: Synthetic polynucleotide
caggtgcagctggtgcagtctggggctgcggtgaagaagcctgggtcctccgtgaaggtctcctgcaagtcttctggaggcaccttcagcaattatgctattaactgggtgcgacaggcccctggacaagggcttgagtggatgggagggatcatccctgtgtttggcacagcagactacgctcagaagttcaagggcagagtctcgattaccgcggacgaatccacggaaacagcctacatggaactgagtggcctgagatctgacgacacggccgtattttactgtgcgcgagacgggggtagtgtggcagcagagactacatggggccagggaaccctggtcaccgtctcctcag

SEQ ID NO: 774 - protein, 119 aa, Artificial Sequence
  Description of Artificial Sequence: Synthetic polypeptide
QVQLVQSGAAVKKPGSSVKVSCKSSGGTFSNYAINWVRQAPGQGLEWMGGIIPVFGTADYAQKFKGRVSITADESTETAYMELSGLRSDDTAVFYCARDGGSVAAETTWGQGTLVTVSS

SEQ ID NO: 775 - protein, 12 aa, Artificial Sequence
  Description of Artificial Sequence: Synthetic peptide
ARDGGSVAAETT

SEQ ID NO: 776 - DNA, 321 bp, Artificial Sequence
  Description of Artificial Sequence: Synthetic polynucleotide
gacatccagatgacccagtctccatcctccctgtctgcatctgtaggagacagagtcaccatcacttgccgggcaagtcagagcattagcagctatttaaattggtatcagcagaagccagggaaagcccctgagctcctgatctatgaaacatccaatttggaaagtggggtcccatcaaggttcagtggcggtggatctgggacagagttcactctcaccatcaggagtctacagcctgaagattttgcgacttattactgtcaacagagttacaggacccctcgggcgttcggccaagggaccaaggtggaagtcaaa

SEQ ID NO: 777 - protein, 107 aa, Artificial Sequence
  Description of Artificial Sequence: Synthetic polypeptide
DIQMTQSPSSLSASVGDRVTITCRASQSISSYLNWYQQKPGKAPELLIYETSNLESGVPSRFSGGGSGTEFTLTIRSLQPEDFATYYCQQSYRTPRAFGQGTKVEVK

SEQ ID NO: 778 - protein, 9 aa, Artificial Sequence
  Description of Artificial Sequence: Synthetic peptide
QQSYRTPRA

SEQ ID NO: 779 - DNA, 408 bp, Artificial Sequence
  Description of Artificial Sequence: Synthetic polynucleotide
gaggtgcagctggtggagtctgggggaggcttggtacagccagggcggtccctgagactctcctgtacagggtctggattcaactttggtgattatgctattagctgggtccgccaggctccagggaaggggctggagtgggtaggtttcattagaagtaaagctgatggtgggacaagtcaatacgccgcgtctgcgagaggcagattcaccatctctagagatgattccaaaagcatcgtctatctgcaaatgaacagcctgcaaaccgaggacacagccatccactattgtactcgagtgcaaatgcggcgggcggattgcagtggtaacaggtgctatgacgtcccctacttctacttctacatggacgtctggggcatggggaccacggtcaccgtttcctca

SEQ ID NO: 780 - protein, 136 aa, Artificial Sequence; identical to SEQ ID NO: 1
  Description of Artificial Sequence: Synthetic polypeptide

SEQ ID NO: 781 - protein, 27 aa, Artificial Sequence
  Description of Artificial Sequence: Synthetic peptide
TRVQMRRADCSGNRCYDVPYFYFYMDV

SEQ ID NO: 782 - DNA, 325 bp, Artificial Sequence
  Description of Artificial Sequence: Synthetic polynucleotide
gacatccagatgacccagtctccatcctccctgtctgcctctgtaggagacagagtcaccatcacttgccgggcaagtcagagcattagcaactatttaaattggtatcagcagaaaccagggaatgcccctaaactcctgatctatgctgcatccagtttgcaaagtggggtcccatcgaggttcagtggcagtggatctgggacagatttcactctcaccatcaacagtctgcaacctgaagattctgcaacttactactgtcaacagagttacagtacccctccgctcactttcggcggagggaccaaggtggagatcaaac

SEQ ID NO: 783 - protein, 108 aa, Artificial Sequence
  Description of Artificial Sequence: Synthetic polypeptide
DIQMTQSPSSLSASVGDRVTITCRASQSISNYLNWYQQKPGNAPKLLIYAASSLQSGVPSRFSGSGSGTDFTLTINSLQPEDSATYYCQQSYSTPPLTFGGGTKVEIK

SEQ ID NO: 784 - protein, 10 aa, Artificial Sequence
  Description of Artificial Sequence: Synthetic peptide
QQSYSTPPLT

SEQ ID NO: 785 - DNA, 358 bp, Artificial Sequence
  Description of Artificial Sequence: Synthetic polynucleotide
caggtgcagctggtgcagtctggggctgaggtgaggaagcctgggtcctcggtgaaggtctcctgcaagacttttggaggcaccttcggcaactatgctatcatctgggtgcgacaggcccctggacaagggcttgagtgcatgggagggatcatccctgtctttgggacaccaaactacgcagagaagttccagggcagagtcacgattaccgcggacgaatccacgagcacagcctacatggagctgagcagcctgacatctgaggacacgggcgtctatttttgtgcgagagactctggagcaacagccagctttgactactggggacagggaactctggtcaccgtctcctcag

SEQ ID NO: 786 - protein, 119 aa, Artificial Sequence
  Description of Artificial Sequence: Synthetic polypeptide
QVQLVQSGAEVRKPGSSVKVSCKTFGGTFGNYAIIWVRQAPGQGLECMGGIIPVFGTPNYAEKFQGRVTITADESTSTAYMELSSLTSEDTGVYFCARDSGATASFDYWGQGTLVTVSS

SEQ ID NO: 787 - protein, 12 aa, Artificial Sequence
  Description of Artificial Sequence: Synthetic peptide
ARDSGATASFDY

SEQ ID NO: 788 - DNA, 320 bp, Artificial Sequence
  Description of Artificial Sequence: Synthetic polynucleotide
gacatccagatgacccagtctccatcctccctgtctgcatctgtgggagacagagtcaccatcacttgccgggcaagtcagagcattagcacctatttaaattggtatcaacagaaaccagggaaagcccctaagctcctgatctattctgcatccggcttgcaaagtggggtcccatcaaggttcagtggcagtgggtctgggacagatttcactctcaccatcatcagtctggaacgtgaagattttgctaattactactgtcaacagagttacagggcccctcaaacttttggccaggggaccaagctggagatcaa

SEQ ID NO: 789 - protein, 106 aa, Artificial Sequence
  Description of Artificial Sequence: Synthetic polypeptide
DIQMTQSPSSLSASVGDRVTITCRASQSISTYLNWYQQKPGKAPKLLIYSASGLQSGVPSRFSGSGSGTDFTLTIISLEREDFANYYCQQSYRAPQTFGQGTKLEI

SEQ ID NO: 790 - protein, 9 aa, Artificial Sequence
  Description of Artificial Sequence: Synthetic peptide
QQSYRAPQT

SEQ ID NO: 791 - DNA, 388 bp, Artificial Sequence
  Description of Artificial Sequence: Synthetic polynucleotide
caggtgcagctggtgcagtctggggcggaactgaagaagcctggggcctcagtgagggtctcctgcaaggcttctggatacactttcaccgcctattatatgcactgggtgcgacaggcccctggacaagggcttgagtggatgggatggatcaaccctaataatggtgacacaaattatgcacagaattttcagggcagggtcaccatgaccagggacacgtccaccaccacagcctacttggaattgagcaggctgagatctgacgacacgtccgtgtattactgtgcgagaccatcagttcgctacgatttttggagtgattattatccaattaacgattcttttgatatctggggtcaagggacaatggtcaccgtctcctcag

SEQ ID NO: 792 - protein, 129 aa, Artificial Sequence
  Description of Artificial Sequence: Synthetic polypeptide
QVQLVQSGAELKKPGASVRVSCKASGYTFTAYYMHWVRQAPGQGLEWMGWINPNNGDTNYAQNFQGRVTMTRDTSTTTAYLELSRLRSDDTSVYYCARPSVRYDFWSDYYPINDSFDIWGQGTMVTVSS

SEQ ID NO: 793 - protein, 22 aa, Artificial Sequence
  Description of Artificial Sequence: Synthetic peptide
ARPSVRYDFWSDYYPINDSFDI

SEQ ID NO: 794 - DNA, 322 bp, Artificial Sequence
  Description of Artificial Sequence: Synthetic polynucleotide
gaaattgtgttgacacagtctccagccaccctgtctctgtctccaggagaaagagccaccctctcctgcagggccagtcagagtgttggcacctacttagtctggtaccaacagaaacctggccaggctcccaagctcctcatctctgatgcctccaatagggccactggcatcccagccaggttcagtggcagtgggtctgggacagacttcactctcaccatcagcggcctggagcctcaagattttgcagtttattactgtcagcagtgtaccatctggccgctcactttcggcggagggaccaaggtggagatcaaac

SEQ ID NO: 795 - protein, 107 aa, Artificial Sequence
  Description of Artificial Sequence: Synthetic polypeptide
EIVLTQSPATLSLSPGERATLSCRASQSVGTYLVWYQQKPGQAPKLLISDASNRATGIPARFSGSGSGTDFTLTISGLEPQDFAVYYCQQCTIWPLTFGGGTKVEIK

SEQ ID NO: 796 - protein, 9 aa, Artificial Sequence
  Description of Artificial Sequence: Synthetic peptide
QQCTIWPLT

SEQ ID NO: 797 - DNA, 370 bp, Artificial Sequence
  Description of Artificial Sequence: Synthetic polynucleotide
gaggtgcagctgttggagtctgggggaaccttgatacagccgggggggtccctgagactctcctgtgtagcctctggatttagttttgacaactatgccatgagttgggtccgccaggctccagggaaggggctggagtgggtctcatgtattagtgggagtggtgaaaccacgtacttcgcagaccccgtgaagggccggttcaccatctctagagacaattccaggaacacgctgtatctgcaaatgaatagcctgacagccgaggacacggccatatattactgtgcgaaagatcaagtcttcggcagctcgtccttttacatttttgaatattggggccggggaaccctggtcaccgtctcctcag

SEQ ID NO: 798 - protein, 123 aa, Artificial Sequence
  Description of Artificial Sequence: Synthetic polypeptide
EVQLLESGGTLIQPGGSLRLSCVASGFSFDNYAMSWVRQAPGKGLEWVSCISGSGETTYFADPVKGRFTISRDNSRNTLYLQMNSLTAEDTAIYYCAKDQVFGSSSFYIFEYWGRGTLVTVSS

SEQ ID NO: 799 - protein, 16 aa, Artificial Sequence
  Description of Artificial Sequence: Synthetic peptide
AKDQVFGSSSFYIFEY

SEQ ID NO: 800 - DNA, 331 bp, Artificial Sequence
  Description of Artificial Sequence: Synthetic polynucleotide
gaaatagtgatgacgcagtctccagccaccctgtctgtgtctccaggggaaagagtcaccctctcctgcagggccagtcagagtattggcagcaacttagcctggtaccagcagaaacctggccaggctcccaggctcctcctctcttatgcatccaccagggccgctggtgtcccagccaggttcaggggcagtgggtctgggacagagtacactctcaccatcaccagcctgcagtctgaagattttgcagtgtattactgtcagcagtatgataagtggcctccgcgtgcgaacacttttggcccggggaccaagctggagaccaaac

SEQ ID NO: 801 - protein, 110 aa, Artificial Sequence
  Description of Artificial Sequence: Synthetic polypeptide
EIVMTQSPATLSVSPGERVTLSCRASQSIGSNLAWYQQKPGQAPRLLLSYASTRAAGVPARFRGSGSGTEYTLTITSLQSEDFAVYYCQQYDKWPPRANTFGPGTKLETK

SEQ ID NO: 802 - protein, 12 aa, Artificial Sequence
  Description of Artificial Sequence: Synthetic peptide
QQYDKWPPRANT

SEQ ID NO: 803 - DNA, 358 bp, Artificial Sequence
  Description of Artificial Sequence: Synthetic polynucleotide
caggtccagctggtgcagtctggggctgaggtgaagaagcctgggtcctcggtgaaggtctcctgcaaggcttctggaggcaccttcagcaactttgctatcaactgggtgcgacaggcccctggacaaggacttgagtggatgggaaggatcatccctgtctttggttcagcagactatgcacagaagttccagggcagagtcacgattaccgcggacgaatccacgagcacagcctacatggagctgatcagcccgagatctgaggacacggccgtttattactgtgcgagagatggtggtgttggtggttcctttgaatactggggccagggaaccctggtcaccgtctcctcag

SEQ ID NO: 804 - protein, 119 aa, Artificial Sequence
  Description of Artificial Sequence: Synthetic polypeptide
QVQLVQSGAEVKKPGSSVKVSCKASGGTFSNFAINWVRQAPGQGLEWMGRIIPVFGSADYAQKFQGRVTITADESTSTAYMELISPRSEDTAVYYCARDGGVGGSFEYWGQGTLVTVSS

SEQ ID NO: 805 - protein, 12 aa, Artificial Sequence
  Description of Artificial Sequence: Synthetic peptide
ARDGGVGGSFEY

SEQ ID NO: 806 - DNA, 337 bp, Artificial Sequence
  Description of Artificial Sequence: Synthetic polynucleotide
  modified_base (40)..(40): a, c, t, g, unknown or other
gatattgtgatgactcagtctccactctccctgcccgtcncccctggagagccggcctccatctcctgcaggtctagtcagagcctcctgcatagagatggatacaactatttggattggtacctgcagaagccagggcagtctccacagctcctgatcaatttgagttctaatcgggcctccggggtccctgacaggttcagtggcagtggatcaggcacagattttatactgaaaatcagcagagtggaggctgaggatgttggggtttattactgcatgcaagctctacaaactccgatcaccttcggccaagggacacggctggagattaaac

SEQ ID NO: 807 - protein, 112 aa, Artificial Sequence
  Description of Artificial Sequence: Synthetic polypeptide
  MOD_RES (14)..(14): Any amino acid
DIVMTQSPLSLPVXPGEPASISCRSSQSLLHRDGYNYLDWYLQKPGQSPQLLINLSSNRASGVPDRFSGSGSGTDFILKISRVEAEDVGVYYCMQALQTPITFGQGTRLEIK

SEQ ID NO: 808 - protein, 9 aa, Artificial Sequence
  Description of Artificial Sequence: Synthetic peptide
MQALQTPIT

SEQ ID NO: 809 - DNA, 358 bp, Artificial Sequence
  Description of Artificial Sequence: Synthetic polynucleotide
caggtccagctggtgcagtctggggctgagatgaagaagcctgggtcctcggtgaaggtctcctgcaaggcttctggaggcaacttcggcaactatgctatgcactggctgcgacaggcccctggacaaggacttgagtggatgggaaacatcattcctgtctttggcacaccaaactacgcacagaagttgcagggcagactcaccattaccgcggacgaatctacgaccacaacctatatggaactgagcagcctaagatctgacgacacggccgtgtattactgtgcgagggacagtggtgccacgaacgactttgactcctggggccagggaaccctggtctccgtttcctcag

SEQ ID NO: 810 - protein, 119 aa, Artificial Sequence
  Description of Artificial Sequence: Synthetic polypeptide
QVQLVQSGAEMKKPGSSVKVSCKASGGNFGNYAMHWLRQAPGQGLEWMGNIIPVFGTPNYAQKLQGRLTITADESTTTTYMELSSLRSDDTAVYYCARDSGATNDFDSWGQGTLVSVSS

SEQ ID NO: 811 - protein, 12 aa, Artificial Sequence
  Description of Artificial Sequence: Synthetic peptide
ARDSGATNDFDS

SEQ ID NO: 812 - DNA, 322 bp, Artificial Sequence
  Description of Artificial Sequence: Synthetic polynucleotide
gacatccagatgacccagtctccatcctccctgtctgcatctgtaggagacagagtcaccatcacttgccgggcaagtcagagcattactttctatttgaattggtatcagcagaaaccagggaaagcccctaaactactgatctatactgcgaccggtttgcaaactggggtcccatcaaggttcagtggcagtggatctgggacagagttcactctcaccatcagcagtctgcaacctgaagatgttgcaacttactactgtcaacagagttacagtaccccgtacacttttggccaggggaccaagctggagatcaaac

SEQ ID NO: 813 - protein, 107 aa, Artificial Sequence
  Description of Artificial Sequence: Synthetic polypeptide
DIQMTQSPSSLSASVGDRVTITCRASQSITFYLNWYQQKPGKAPKLLIYTATGLQTGVPSRFSGSGSGTEFTLTISSLQPEDVATYYCQQSYSTPYTFGQGTKLEIK

SEQ ID NO: 814 - protein, 9 aa, Artificial Sequence
  Description of Artificial Sequence: Synthetic peptide
QQSYSTPYT

SEQ ID NO: 815 - DNA, 399 bp, Artificial Sequence
  Description of Artificial Sequence: Synthetic polynucleotide
caggttcagctggtgcagtctggggctgaggtgaagaagcctggggcctcagtgaaggtctcctgcaaggcttctggttacatgtttaccaactatggtatcagctgggtgcgacaggcccctggagaagggcttgagttgatgggatggatcagcggtcacaatgggaacacaaactttgaacacaaggtccaggacagagtcaccatgaccacagacacatccaccagcacagcctacatggaactgaggagcctgagatctgacgacacggccgtgtattactgtgcgagagtcgcttttactgtggttcggggagttattgatttcaacatgaacccctactactactactacatggacgtctggggcaaagggaccacggtcaccgtctcctca

SEQ ID NO: 816 - protein, 133 aa, Artificial Sequence
  Description of Artificial Sequence: Synthetic polypeptide
QVQLVQSGAEVKKPGASVKVSCKASGYMFTNYGISWVRQAPGEGLELMGWISGHNGNTNFEHKVQDRVTMTTDTSTSTAYMELRSLRSDDTAVYYCARVAFTVVRGVIDFNMNPYYYYYMDVWGKGTTVTVSS

SEQ ID NO: 817 - protein, 26 aa, Artificial Sequence
  Description of Artificial Sequence: Synthetic peptide
ARVAFTVVRGVIDFNMNPYYYYYMDV

SEQ ID NO: 818 - DNA, 325 bp, Artificial Sequence
  Description of Artificial Sequence: Synthetic polynucleotide
gacatccagatgacccagtctccatcctccctgtctgcatctgtaggagacagagtcaccatcacttgccgggcaagtcagaccattaccaactatttaaattggtatcagcagaaaccagggaaagcccctcacctcctgatctctgctgcatccagtttgcaaactggggtcccatcacggttcagtggcagtggatctgggacagatttcactctcaccatcagcggtctgcaacctgaagattttgcaacttactactgtcaacagagttacagtacccccgccctcactttcggcggagggaccagggtggagatcaaac

SEQ ID NO: 819 - protein, 108 aa, Artificial Sequence
  Description of Artificial Sequence: Synthetic polypeptide
DIQMTQSPSSLSASVGDRVTITCRASQTITNYLNWYQQKPGKAPHLLISAASSLQTGVPSRFSGSGSGTDFTLTISGLQPEDFATYYCQQSYSTPALTFGGGTRVEIK

SEQ ID NO: 820 - protein, 10 aa, Artificial Sequence
  Description of Artificial Sequence: Synthetic peptide
QQSYSTPALT

SEQ ID NO: 821 - DNA, 355 bp, Artificial Sequence
  Description of Artificial Sequence: Synthetic polynucleotide
caggtgcagctggtgcagtctggggctgaggtgaagaagcctggggcctcagtgaaggtttcctgcaaggcatttggatacacgttcaacagtcactatttacactgggtgcgacaggcccctggacaaggacttgagtgggtaggaataatcaaccctagtggtggtagcacaagctatgcacagaaattccagggcagagtcaccatgaccagtgacacgtccacgagaacactctacatggaattgaacagcctgagatctgaggacacggccgtgtactactgtgcgagagtgcgaggaggatggaactttgactcctggggccagggaaccctggtcaccgtctcctcag

SEQ ID NO: 822 - protein, 118 aa, Artificial Sequence
  Description of Artificial Sequence: Synthetic polypeptide
QVQLVQSGAEVKKPGASVKVSCKAFGYTFNSHYLHWVRQAPGQGLEWVGIINPSGGSTSYAQKFQGRVTMTSDTSTRTLYMELNSLRSEDTAVYYCARVRGGWNFDSWGQGTLVTVSS

SEQ ID NO: 823 - protein, 11 aa, Artificial Sequence
  Description of Artificial Sequence: Synthetic peptide
ARVRGGWNFDS

SEQ ID NO: 824 - DNA, 307 bp, Artificial Sequence
  Description of Artificial Sequence: Synthetic polynucleotide
gacatccagatgacccagtctccttccaccctgtctgcatctgtaggagacagagtcactatcacttgccgggccagtcagactattaacaactggttggcctggtatcagcagaaaccagggaaagcccctaaactcctgatctataaggcgtctagtttagagactggggtcccatcaaggttcagcggcagtggatctgggacagaattcactctcaccatcagcagcctgcagcctgatgattttgcaacttattactgccaacaatatagcactttcggccctgggaccaaagtgcatatca

SEQ ID NO: 825 - protein, 102 aa, Artificial Sequence
  Description of Artificial Sequence: Synthetic polypeptide
DIQMTQSPSTLSASVGDRVTITCRASQTINNWLAWYQQKPGKAPKLLIYKASSLETGVPSRFSGSGSGTEFTLTISSLQPDDFATYYCQQYSTFGPGTKVHI

SEQ ID NO: 826 - protein, 5 aa, Artificial Sequence
  Description of Artificial Sequence: Synthetic peptide
QQYST

SEQ ID NO: 827 - DNA, 346 bp, Artificial Sequence; identical to SEQ ID NO: 143
  Description of Artificial Sequence: Synthetic polynucleotide

SEQ ID NO: 828 - protein, 115 aa, Artificial Sequence; identical to SEQ ID NO: 25
  Description of Artificial Sequence: Synthetic polypeptide

SEQ ID NO: 829 - protein, 8 aa, Artificial Sequence
  Description of Artificial Sequence: Synthetic peptide
VRATWFDP

SEQ ID NO: 830 - DNA, 325 bp, Artificial Sequence
  Description of Artificial Sequence: Synthetic polynucleotide
gacatccagatgacccagtctccatcctccctgtctgcatctgtaggagacagagtcaccatcacttgccaggcgagtcacgacattagcaaccgtttaaactggtttcagcagaaaccagggaaagcccctaagctcctgatctccgatgcatccaatttggaaacaggggtcccatcaaggttcagtggaagtggatctgggacagattttactttcagcattagcagcctgcagcctgaagattttgcaacatattactgtcaacattatgatagtttctctcggtggacgttcggccaggggaccaaggtggaaatcaaac

SEQ ID NO: 831 - protein, 108 aa, Artificial Sequence
  Description of Artificial Sequence: Synthetic polypeptide
DIQMTQSPSSLSASVGDRVTITCQASHDISNRLNWFQQKPGKAPKLLISDASNLETGVPSRFSGSGSGTDFTFSISSLQPEDFATYYCQHYDSFSRWTFGQGTKVEIK

SEQ ID NO: 832 - protein, 10 aa, Artificial Sequence
  Description of Artificial Sequence: Synthetic peptide
QHYDSFSRWT

SEQ ID NO: 833 - DNA, 367 bp, Artificial Sequence
  Description of Artificial Sequence: Synthetic polynucleotide
caggtgcagctggtggagtctgggggaggcgtggtccagcccgggaggtccctgagactctcctgtgcagcctctggattcaccttcagcgactatatcatgcactgggtccgccaggctccaggcaaggggctggagtgggtggcagttatatggtctgatggagataataagcattatttagaatccgtaaagggccggttcaccatctccagagacaattctaagaaaatgctgtttctggaaatcaacagcctgagagccgaggacacggctgtctattactgtgtgagcgagagtcgtgtgtggcatcttctgggctactttgacaactggggccggggaaccccggtcaccgtctcttcag

SEQ ID NO: 834 - protein, 122 aa, Artificial Sequence
  Description of Artificial Sequence: Synthetic polypeptide
QVQLVESGGGVVQPGRSLRLSCAASGFTFSDYIMHWVRQAPGKGLEWVAVIWSDGDNKHYLESVKGRFTISRDNSKKMLFLEINSLRAEDTAVYYCVSESRVWHLLGYFDNWGRGTPVTVSS

SEQ ID NO: 835 - protein, 15 aa, Artificial Sequence
  Description of Artificial Sequence: Synthetic peptide
VSESRVWHLLGYFDN

SEQ ID NO: 836 - DNA, 322 bp, Artificial Sequence
  Description of Artificial Sequence: Synthetic polynucleotide
gaaattgtgttgacacagtctccagccaccctgtctttgtctccaggggagagagccaccctctcctgcagggccagtcagagtattagcacttacttagcctggtaccaacagaaacctggccaggctccccggctcctcatctatgatgcatccacccgggccactggcatcccagccaggttcagtggcagtggctctgggacagacttcactctgaccatcagtggcctagagcctgaagattttgcagtttattactgtcagcagcggagcggctggccagtcactttcggccctgggaccaaggtggacatcaaac

SEQ ID NO: 837 - protein, 107 aa, Artificial Sequence
  Description of Artificial Sequence: Synthetic polypeptide
EIVLTQSPATLSLSPGERATLSCRASQSISTYLAWYQQKPGQAPRLLIYDASTRATGIPARFSGSGSGTDFTLTISGLEPEDFAVYYCQQRSGWPVTFGPGTKVDIK

SEQ ID NO: 838 - protein, 9 aa, Artificial Sequence
  Description of Artificial Sequence: Synthetic peptide
QQRSGWPVT

SEQ ID NO: 839 - DNA, 379 bp, Artificial Sequence
  Description of Artificial Sequence: Synthetic polynucleotide
caggtgcagctgcaggagtcgggcccaggactggtgaagccttcggagaccctgtccctcacctgcactgtctctggtggctccacggagaaatactactggaattggatccgacagtccccagggaggggactggagtggatgggatatgtctttcacagtggagacaccaactacaatccctccctccagagtcgagtcaccatgtcagtggacacgtccaagaaccagttctccctgacgttgaactctgttaccgctgcggacacggccgtttattactgtgcgagagggggcatttcgggatattgttatggtggtaattgctttgactggatcgacccttggggccaaggaatcctggtcattgtctcctcag

SEQ ID NO: 840 - protein, 126 aa, Artificial Sequence
  Description of Artificial Sequence: Synthetic polypeptide
QVQLQESGPGLVKPSETLSLTCTVSGGSTEKYYWNWIRQSPGRGLEWMGYVFHSGDTNYNPSLQSRVTMSVDTSKNQFSLTLNSVTAADTAVYYCARGGISGYCYGGNCFDWIDPWGQGILVIVSS

SEQ ID NO: 841 - protein, 20 aa, Artificial Sequence
  Description of Artificial Sequence: Synthetic peptide
ARGGISGYCYGGNCFDWIDP

SEQ ID NO: 842 - DNA, 322 bp, Artificial Sequence
  Description of Artificial Sequence: Synthetic polynucleotide
gacatccagatgacccagtctccatcctccctgtctgcctctgtaggagacagagtcagcatcacttgccgggcaagtcagagcagtagcacttatgtaaattggtatcagcagaaaccaggggaagcccctcaggtcctgatatatggtgcatccagtttgcgaagtggggccccatcaaggttcagaggcagtggatctgggacagatttcactctcaccatcagcagtctgcaacctgaggattttggaacttattactgtcaacagagttatagtatcccgtggacgttcggccaagggaccagggtggagatgaaac

SEQ ID NO: 843 - protein, 107 aa, Artificial Sequence
  Description of Artificial Sequence: Synthetic polypeptide
DIQMTQSPSSLSASVGDRVSITCRASQSSSTYVNWYQQKPGEAPQVLIYGASSLRSGAPSRFRGSGSGTDFTLTISSLQPEDFGTYYCQQSYSIPWTFGQGTRVEMK

SEQ ID NO: 844 - protein, 9 aa, Artificial Sequence
  Description of Artificial Sequence: Synthetic peptide
QQSYSIPWT

SEQ ID NO: 845 - DNA, 355 bp, Artificial Sequence
  Description of Artificial Sequence: Synthetic polynucleotide
caggtgcagctggtgcagtctggggctgaggtgaagaagcctggatcctcggtgaaggtctcctgcaagagttctggaggcaccttcagcaactttgcaatccactgggtgcggcaggcccctggacaagggcttgagtggatgggaggaattatccctgtctttggtacaccaaacttcgcacagaagttccagggcagagtcacgattaccgcggacgaatccacgagcacagcctacatggagctgagcagcctgagatctgaggacacggccatgtatttttgtgcgagagaggattggagtgcctcttttgactcctggggccagggaaccctggtcaccgtctcttcag

SEQ ID NO: 846 - protein, 118 aa, Artificial Sequence
  Description of Artificial Sequence: Synthetic polypeptide
QVQLVQSGAEVKKPGSSVKVSCKSSGGTFSNFAIHWVRQAPGQGLEWMGGIIPVFGTPNFAQKFQGRVTITADESTSTAYMELSSLRSEDTAMYFCAREDWSASFDSWGQGTLVTVSS

SEQ ID NO: 847 - protein, 11 aa, Artificial Sequence
  Description of Artificial Sequence: Synthetic peptide
AREDWSASFDS

SEQ ID NO: 848 - DNA, 335 bp, Artificial Sequence
  Description of Artificial Sequence: Synthetic polynucleotide
  modified_base (40)..(40): a, c, t, g, unknown or other
gatattgtgatgactcagtctccactctccctgcccgtcncccctggagagccggcctccatctcctgcaggtctagtcagagcctcctgcatagagatggatacaactatttgcattggtacctgcagaagccagggcagtctccacagctcctgatttttttggcttctaatcgggcctccggggtccctgacaggttcagtggcagtggatcaggcacagcttttacactgaaaatcagcagagtggaggctgaggatgttggggtttattactgcatgcaagctctacaaactcctaagacttttggccaggggaccaagctggagatcaa

SEQ ID NO: 849 - protein, 111 aa, Artificial Sequence
  Description of Artificial Sequence: Synthetic polypeptide
  MOD_RES (14)..(14): Any amino acid
DIVMTQSPLSLPVXPGEPASISCRSSQSLLHRDGYNYLHWYLQKPGQSPQLLIFLASNRASGVPDRFSGSGSGTAFTLKISRVEAEDVGVYYCMQALQTPKTFGQGTKLEI

SEQ ID NO: 850 - protein, 9 aa, Artificial Sequence
  Description of Artificial Sequence: Synthetic peptide
MQALQTPKT

SEQ ID NO: 851 - DNA, 364 bp, Artificial Sequence
  Description of Artificial Sequence: Synthetic polynucleotide
gaggtgcagctggtggagtctgggggaggcttggtacagcctggagggtccctgagactctcctgttcagcctctggattctccttcagcggttatgacatgaactgggtccgccaggctccagggaagggtctggagtggatttcatacattagtaacagtggaagtatcatctactacgcagactctgtgaacggccgattcaccatctccagagacaacgccgagaactcactgtatctgcaaatgaacggcctgagagccgaggacacggctgtatattactgtgcgagagaacgatatatgggcgcgtacaactggttcgacccctggggccagggaacactggtcatcgtctcctcag

SEQ ID NO: 852 - protein, 121 aa, Artificial Sequence
  Description of Artificial Sequence: Synthetic polypeptide
EVQLVESGGGLVQPGGSLRLSCSASGFSFSGYDMNWVRQAPGKGLEWISYISNSGSIIYYADSVNGRFTISRDNAENSLYLQMNGLRAEDTAVYYCARERYMGAYNWFDPWGQGTLVIVSS

SEQ ID NO: 853 - protein, 14 aa, Artificial Sequence
  Description of Artificial Sequence: Synthetic peptide
ARERYMGAYNWFDP

SEQ ID NO: 854 - DNA, 325 bp, Artificial Sequence
  Description of Artificial Sequence: Synthetic polynucleotide
gacatccagttgacccagtctccatccttcctgtctgcatctgtaggagacagagtcaccatcacttgccgggccagtcagggcattagcagttatttagcctggtatcagcaaaaaccagggaaagcccctaaggtcctgatctatgctgcatccactttgcaaagtggggtcccatcaaggttcagcggcagtggatctgggacagaattcactctcacaatcagcagcgtgcagcctgaagattctgcaacctattactgtcaacaacttaatagttccccgatgtacacttttggccaggggaccaagctggagatcaaac

SEQ ID NO: 855 - protein, 108 aa, Artificial Sequence
  Description of Artificial Sequence: Synthetic polypeptide
DIQLTQSPSFLSASVGDRVTITCRASQGISSYLAWYQQKPGKAPKVLIYAASTLQSGVPSRFSGSGSGTEFTLTISSVQPEDSATYYCQQLNSSPMYTFGQGTKLEIK

SEQ ID NO: 856 - protein, 10 aa, Artificial Sequence
  Description of Artificial Sequence: Synthetic peptide
QQLNSSPMYT

SEQ ID NO: 857 - DNA, 361 bp, Artificial Sequence
  Description of Artificial Sequence: Synthetic polynucleotide
caggtgcagctggtgcagtctgggactgaggtgaagaagcctgggtcctcggtgaagatctcctgcaaggcctctggaggcagcttcagcaactatgctttcaactgggtgcgacaggcccctggacaggggcttgagtggatgggaggggtcatccctttttttggtacaccaaacttcgcacagaagttccagggcagagtcacacttaccgcggacgaatccacgagcactgcctacatggagctgagccgcctgagatctgaggacacggccgtgtattactgtgcgagacccggcggccatcaaagttggggctttgactactggggccagggaaccctggtcaccgtctcctcag

SEQ ID NO: 858 - protein, 120 aa, Artificial Sequence
  Description of Artificial Sequence: Synthetic polypeptide
QVQLVQSGTEVKKPGSSVKISCKASGGSFSNYAFNWVRQAPGQGLEWMGGVIPFFGTPNFAQKFQGRVTLTADESTSTAYMELSRLRSEDTAVYYCARPGGHQSWGFDYWGQGTLVTVSS

SEQ ID NO: 859 - protein, 13 aa, Artificial Sequence
  Description of Artificial Sequence: Synthetic peptide
ARPGGHQSWGFDY

SEQ ID NO: 860 - DNA, 319 bp, Artificial Sequence
  Description of Artificial Sequence: Synthetic polynucleotide
gacatccagatgacccagtctccatcctccctgtctgcttctgtaggagacaaagtcaccatcacttgccgggcgagtcagagcatcagcacctatttaaattggtatcagcagagaccagggaaagcccctaagctcctaatctatgctgcatccactttgcgaagtggggtcccatcacggttcagtggcagtggatctgggacagacttcactctctccatcaacagtctgcaacctgaagattttgcaacttattattgtcaacagagtgacagtgccccctacacttttggccaggggaccaagctggagatca

SEQ ID NO: 861 - protein, 106 aa, Artificial Sequence
  Description of Artificial Sequence: Synthetic polypeptide
DIQMTQSPSSLSASVGDKVTITCRASQSISTYLNWYQQRPGKAPKLLIYAASTLRSGVPSRFSGSGSGTDFTLSINSLQPEDFATYYCQQSDSAPYTFGQGTKLEI

SEQ ID NO: 862 - protein, 9 aa, Artificial Sequence
  Description of Artificial Sequence: Synthetic peptide
QQSDSAPYT

SEQ ID NO: 863 - DNA, 359 bp, Artificial Sequence
  Description of Artificial Sequence: Synthetic polynucleotide
caggtgcagctggtgcagtctggggctgaggtgcagaagcctggggcctcagtgaaaatttcctgcaaggcatctggatacaccttcacccacttctacatacactgggtgcgccagacccctagacaagggcttgagtggatgggactaatcgaccctgatggtggttccacaacatacgcccagcaattccagggcagagtcaccatgaccagggacacgtccacgaacacagtctacatggagctgagcagcctcagatctgaggacacggccatgtattactgtgcgaaacccgtcactccggtggacccaacctttgactactggggccagggaaccgtggtcaccgtctcctc

SEQ ID NO: 864 - protein, 119 aa, Artificial Sequence
  Description of Artificial Sequence: Synthetic polypeptide
QVQLVQSGAEVQKPGASVKISCKASGYTFTHFYIHWVRQTPRQGLEWMGLIDPDGGSTTYAQQFQGRVTMTRDTSTNTVYMELSSLRSEDTAMYYCAKPVTPVDPTFDYWGQGTVVTVS

SEQ ID NO: 865 - protein, 13 aa, Artificial Sequence
  Description of Artificial Sequence: Synthetic peptide
AKPVTPVDPTFDY

SEQ ID NO: 866 - DNA, 319 bp, Artificial Sequence
  Description of Artificial Sequence: Synthetic polynucleotide
gaaatagtgatgacgcagtctccagccaccctgtctgtgtctccaggggaaagagccaccctctcctgcagggccagtcagcgtgtgacccacaacttagtctggtaccagcagaaacctggccaggctccccggctcctcatctatgatgcatccaccagggcccctggtatcccggccagattcagtggcagtgggtctgggacagagttcactctcaccatcagcagcctgcagtctgaagattctgcagtttattactgtcagcagtatgataggtggcctccctcttttggccgggggaccaagctggagatca

SEQ ID NO: 867 - protein, 106 aa, Artificial Sequence
  Description of Artificial Sequence: Synthetic polypeptide
EIVMTQSPATLSVSPGERATLSCRASQRVTHNLVWYQQKPGQAPRLLIYDASTRAPGIPARFSGSGSGTEFTLTISSLQSEDSAVYYCQQYDRWPPSFGRGTKLEI

SEQ ID NO: 868 - protein, 9 aa, Artificial Sequence
  Description of Artificial Sequence: Synthetic peptide
QQYDRWPPS

SEQ ID NO: 869 - DNA, 358 bp, Artificial Sequence
  Description of Artificial Sequence: Synthetic polynucleotide
caggtgcagctggtgcagtctggggctgaggtgaagaagcctgggtcctcggtgaaggtctcctgcaaggcttctggaggcaccttcagcagctatgctatcaactgggtgcgacaggcccctggacaagggcttgagtggatgggagggatcatccctatctttggtacaccaaactacgcacagaagttccagggcagagtcacgattaccgcggacgaatccacgagcacagcctacatggagctgagcagcctgagatctgaggacacggccgtgtattactgtgcgagagacggtggcggtgcgcgcgacttcgacccctggggccagggaaccctggtcaccgtctcctcag

SEQ ID NO: 870 - protein, 119 aa, Artificial Sequence
  Description of Artificial Sequence: Synthetic polypeptide
QVQLVQSGAEVKKPGSSVKVSCKASGGTFSSYAINWVRQAPGQGLEWMGGIIPIFGTPNYAQKFQGRVTITADESTSTAYMELSSLRSEDTAVYYCARDGGGARDFDPWGQGTLVTVSS

SEQ ID NO: 871 - protein, 12 aa, Artificial Sequence
  Description of Artificial Sequence: Synthetic peptide
ARDGGGARDFDP

SEQ ID NO: 872 - DNA, 322 bp, Artificial Sequence
  Description of Artificial Sequence: Synthetic polynucleotide
gacatccagatgacccagtctccatcctccctgtctgcatctgtaggagacagagtcaccatcacttgccgggcaagtcagagcattgacagctatttaaattggtatcagcacaaaccagggaaagcccctaagctcctgatctatgctgcatccagtttgcaaagtggggtcccatcaaggttcagtggcagtggatctgggacagatttcactctcaccatcagcagtctgcaacctgaagattttgcaacttactactgtcaacagagttacagtagtctctacacttttggccaggggaccaagctggagatcaaac

SEQ ID NO: 873 - protein, 107 aa, Artificial Sequence
  Description of Artificial Sequence: Synthetic polypeptide
DIQMTQSPSSLSASVGDRVTITCRASQSIDSYLNWYQHKPGKAPKLLIYAASSLQSGVPSRFSGSGSGTDFTLTISSLQPEDFATYYCQQSYSSLYTFGQGTKLEIK

SEQ ID NO: 874 - protein, 9 aa, Artificial Sequence
  Description of Artificial Sequence: Synthetic peptide
QQSYSSLYT

SEQ ID NO: 875 - DNA, 358 bp, Artificial Sequence
  Description of Artificial Sequence: Synthetic polynucleotide
caggtgcagctggtgcagtctggggctgaggtgaagaagcctgggtcctcggtgaaggtctcctgcaaggcttctggaggcaccttcaacacctttgctatcaattgggtgcgacaggcccctggacaaggacttgagtggatgggagggctcatccctgtctttggtacaccaaactacgcacagaagttccagggcagagtcaccattaccgcggacgaatctacgagcacagcctacatggagttgagcagcctgagatctgaggacacggccatgtatttctgtgcgagagatgggggggggatagcagcagaggactactggggccagggaaccctggtcaccgtctcctcag

SEQ ID NO: 876 - protein, 119 aa, Artificial Sequence
  Description of Artificial Sequence: Synthetic polypeptide
QVQLVQSGAEVKKPGSSVKVSCKASGGTFNTFAINWVRQAPGQGLEWMGGLIPVFGTPNYAQKFQGRVTITADESTSTAYMELSSLRSEDTAMYFCARDGGGIAAEDYWGQGTLVTVSS

SEQ ID NO: 877 - protein, 12 aa, Artificial Sequence
  Description of Artificial Sequence: Synthetic peptide
ARDGGGIAAEDY

SEQ ID NO: 878 - DNA, 322 bp, Artificial Sequence
  Description of Artificial Sequence: Synthetic polynucleotide
gacatccagatgacccagtctccatcctccctgtctgcatctgtaggagacagagtcaccatcacttgccgggcaagtcagaccattagcacctatttaaattggtaccagcaaaaaccagggagagcccctaagctcctgatctttgaaacatacaatttgcaaactggggtcccatcaaggttcgctggcagtggatcggggacagatttcactctcaccatcagcagtctgcaacctgaagattttgcaacttactactgtcaacagagttataggacccctcggacgttcggccaagggaccaaggtggatatcaaac

SEQ ID NO: 879 - protein, 107 aa, Artificial Sequence
  Description of Artificial Sequence: Synthetic polypeptide
DIQMTQSPSSLSASVGDRVTITCRASQTISTYLNWYQQKPGRAPKLLIFETYNLQTGVPSRFAGSGSGTDFTLTISSLQPEDFATYYCQQSYRTPRTFGQGTKVDIK

SEQ ID NO: 880 - protein, 9 aa, Artificial Sequence
  Description of Artificial Sequence: Synthetic peptide
QQSYRTPRT

SEQ ID NO: 881 - DNA, 378 bp, Artificial Sequence
  Description of Artificial Sequence: Synthetic polynucleotide
caggtgcagctggtgcagtctggggctgaggtgaagaagcctgggtcctcggtgaaggtctcctgtaagactcctggaggcaccttcccgaactatgctatcagctgggtccgacaggtccctggacatggacttgagtggatgggagggatcgtccctgtctctggctcaataaattacgcaccgaagttccagggcagagtcacgtttaccgcggacgaatccacgagcacggcctatatggggctgagcagactgagatctgacgacacggccgtgtattactgtgcgagaggcacgcggcagtggctagaagaacagttctactattatgctctggacgcctggggccaagggaccacggtcatcgtctcctca

SEQ ID NO: 882 - protein, 126 aa, Artificial Sequence
  Description of Artificial Sequence: Synthetic polypeptide
QVQLVQSGAEVKKPGSSVKVSCKTPGGTFPNYAISWVRQVPGHGLEWMGGIVPVSGSINYAPKFQGRVTFTADESTSTAYMGLSRLRSDDTAVYYCARGTRQWLEEQFYYYALDAWGQGTTVIVSS

SEQ ID NO: 883 - protein, 19 aa, Artificial Sequence
  Description of Artificial Sequence: Synthetic peptide
ARGTRQWLEEQFYYYALDA

SEQ ID NO: 884 - DNA, 325 bp, Artificial Sequence
  Description of Artificial Sequence: Synthetic polynucleotide
gaaattgtgttgacgcagtctccaggcaccctgtctgtgtctccaggagaaagagccgccctctcctgcagggccactcagaacattaacggcgcccacttagcctggtaccaacagagacctggccagcctcccaggctcctcatctatggtgcatacatcagggccactggcatcccagccaggttcagtggcagtgggtctgggacagacttcactctcaccatcagtagtctggagcctgaagattttgcaatttatttctgtcagcactatggtaggtcaccgctcactttcggcggagggacaaaggtggagaccaaac

SEQ ID NO: 885 - protein, 108 aa, Artificial Sequence
  Description of Artificial Sequence: Synthetic polypeptide
EIVLTQSPGTLSVSPGERAALSCRATQNINGAHLAWYQQRPGQPPRLLIYGAYIRATGIPARFSGSGSGTDFTLTISSLEPEDFAIYFCQHYGRSPLTFGGGTKVETK

SEQ ID NO: 886 - protein, 9 aa, Artificial Sequence
  Description of Artificial Sequence: Synthetic peptide
QHYGRSPLT

SEQ ID NO: 887 - DNA, 370 bp, Artificial Sequence
  Description of Artificial Sequence: Synthetic polynucleotide
caggtgcagctggtgcagtctggggctgaggtgaagaagcctggggcctcagtgagggtctcctgcaaggcttctggatacaccttcaacaactactatatacactggatacgacaggcccctggacaaggacttgagtggatgggatggatcgaccctaacaatggtcgcacatactttgcacagagatttgaggacagggtcaccttgaccagggacacgtccatcagcacagcctacatggagctgagcaggctgagatctgacgacacggccatgtattactgtgcgagagacttttgtgatggtgactgttacgacaactggttcgacccctggggccagggaaccctggtcaccgtctcctcag

SEQ ID NO: 888 - protein, 123 aa, Artificial Sequence
  Description of Artificial Sequence: Synthetic polypeptide
QVQLVQSGAEVKKPGASVRVSCKASGYTFNNYYIHWIRQAPGQGLEWMGWIDPNNGRTYFAQRFEDRVTLTRDTSISTAYMELSRLRSDDTAMYYCARDFCDGDCYDNWFDPWGQGTLVTVSS

SEQ ID NO: 889 - protein, 16 aa, Artificial Sequence
  Description of Artificial Sequence: Synthetic peptide
ARDFCDGDCYDNWFDP

SEQ ID NO: 890 - DNA, 322 bp, Artificial Sequence
  Description of Artificial Sequence: Synthetic polynucleotide
gaaatagtgatgacgcagtctccagccaccctgtctgtgtctccaggggaaagagccaccctctcctgcagggccagtcacagtgtgaccagcaacttagcctggtaccagcagaaacctggccaggctcccaggctcctcatctatggtgcatccaccagggccactggcatctcagccaggttcagtggcagtgggtctgggacagagttcactctcaccatcagcagcctgcagtctgaagattttgcagtttattactgtcagcagtatgataactggccgctcactttcggcggggggaccaaggtggagatcaaac

SEQ ID NO: 891 - protein, 107 aa, Artificial Sequence
  Description of Artificial Sequence: Synthetic polypeptide
EIVMTQSPATLSVSPGERATLSCRASHSVTSNLAWYQQKPGQAPRLLIYGASTRATGISARFSGSGSGTEFTLTISSLQSEDFAVYYCQQYDNWPLTFGGGTKVEIK

SEQ ID NO: 892 - protein, 9 aa, Artificial Sequence
  Description of Artificial Sequence: Synthetic peptide
QQYDNWPLT

SEQ ID NO: 893 - DNA, 367 bp, Artificial Sequence
  Description of Artificial Sequence: Synthetic polynucleotide
caggtgcagctggtggagtctgggggaggcttggtcaagcctggagggtccctgagactctcctgtggagcctctggattcaccttcagtcgatattacatgagctggatccgccagactccagggaaggggctggagtgggtttcacacattggtggtagtggcactaccatctactatgaagactctgtgaagggccgattcactatctccagggacaacgccaagaactcactgtttctgcaaatgaacagcctgagagccgaggacacggccatgtattactgtgcgagatcggactgggaaacgttggactactggtacttcgatctctggggccgtggcaccctggtcactgtctcctcag

SEQ ID NO: 894 - protein, 122 aa, Artificial Sequence
  Description of Artificial Sequence: Synthetic polypeptide
QVQLVESGGGLVKPGGSLRLSCGASGFTFSRYYMSWIRQTPGKGLEWVSHIGGSGTTIYYEDSVKGRFTISRDNAKNSLFLQMNSLRAEDTAMYYCARSDWETLDYWYFDLWGRGTLVTVSS

SEQ ID NO: 895 - protein, 15 aa, Artificial Sequence
  Description of Artificial Sequence: Synthetic peptide
ARSDWETLDYWYFDL

SEQ ID NO: 896 - DNA, 325 bp, Artificial Sequence
  Description of Artificial Sequence: Synthetic polynucleotide
gaaatagtgatgacgcagtctccagccaccctgtctgtgtctccaggggaaagagtcaccctctcctgcagggccagtcagagtgttagcagcaacttagcctggtaccagcagaaaccggggcaggctcccaggctcctcatctatgctgccaacaccagggccactggtatcccagccaggttcagtggcagtggatttgggacagagttcactctcaccatcagcagcctgcagtctgaagattttgcagtttattactgtcaccagtataataagtggcctcagaacacctttggccaggggaccaagctggagatcaaac

SEQ ID NO: 897 - protein, 108 aa, Artificial Sequence
  Description of Artificial Sequence: Synthetic polypeptide
EIVMTQSPATLSVSPGERVTLSCRASQSVSSNLAWYQQKPGQAPRLLIYAANTRATGIPARFSGSGFGTEFTLTISSLQSEDFAVYYCHQYNKWPQNTFGQGTKLEIK

SEQ ID NO: 898 - protein, 10 aa, Artificial Sequence
  Description of Artificial Sequence: Synthetic peptide
HQYNKWPQNT

SEQ ID NO: 899 - DNA, 355 bp, Artificial Sequence
  Description of Artificial Sequence: Synthetic polynucleotide
caggtgcagctggtgcagtctggggctgaggtgaagaagcctgggtcctcggtgaaggtctcctgcaaggtttctggaggcaccttcagtacctatgctatcaactgggtgcgacaggcccctggacaagggcttcagtggatgggagaaatcatccctgcctttggtacacctaactacgcacagaacttccagggcagagtcacaattaccgcggacgaatccacgagcacagcctacatggaggtgagcagactgcgatctgacgacacggccgtgtattactgtgcgagagatggtggaacggaactacttgactactggggccagggaaccctggtcaccgtctcctcag

SEQ ID NO: 900 - protein, 118 aa, Artificial Sequence
  Description of Artificial Sequence: Synthetic polypeptide
QVQLVQSGAEVKKPGSSVKVSCKVSGGTFSTYAINWVRQAPGQGLQWMGEIIPAFGTPNYAQNFQGRVTITADESTSTAYMEVSRLRSDDTAVYYCARDGGTELLDYWGQGTLVTVSS

SEQ ID NO: 901 - protein, 11 aa, Artificial Sequence
  Description of Artificial Sequence: Synthetic peptide
ARDGGTELLDY

SEQ ID NO: 902 - DNA, 335 bp, Artificial Sequence
  Description of Artificial Sequence: Synthetic polynucleotide
gatgttgtgatgactcagtctccactctccctgcccgtcatccttggacagccggcctccatctcctgcaggtctagtcaaagcctcgtacaccgtgatggaaacacctacttgaattggtttcaccagaggccaggccaatctccaaggcgcctaatttataaggtttctaaccgggactctggggtcccagacagattcagcggcagtgggtcaggcactgatttcacactgaaaatcagcagagtggaggctgaggatgttggggtttattactgcatgcaaggtacacactggcctcgaacgttcggccaagggaccaaggtggaaatcaa

SEQ ID NO: 903 - protein, 111 aa, Artificial Sequence
  Description of Artificial Sequence: Synthetic polypeptide
DVVMTQSPLSLPVILGQPASISCRSSQSLVHRDGNTYLNWFHQRPGQSPRRLIYKVSNRDSGVPDRFSGSGSGTDFTLKISRVEAEDVGVYYCMQGTHWPRTFGQGTKVEI

SEQ ID NO: 904 - protein, 9 aa, Artificial Sequence
  Description of Artificial Sequence: Synthetic peptide
MQGTHWPRT

SEQ ID NO: 905 - DNA, 393 bp, Artificial Sequence
  Description of Artificial Sequence: Synthetic polynucleotide
caggttcagctggtgcagtctggagctgaggtgaagaagcctggggcctcagtgaaggtctcctgcaaggcttctggttacacctttaccagctttggtctcaactgggtgcgacaggcccctggacaaggacttgagtggatgggatggatcagcacttacactggtaacacacgctatgcacagaagtttcagggcagagtcaccatgaccacagacacatccacgagaacagcctacatggaactgaggagcctgagatctgacgacacggccgtgtattactgtgcgacttcagcaacccaacatagcggagcagctgtccccgacggaaactactactactacgctatggacgtctggggccaagggaccacggtcagcgtctcctca

SEQ ID NO: 906 - protein, 131 aa, Artificial Sequence
  Description of Artificial Sequence: Synthetic polypeptide
QVQLVQSGAEVKKPGASVKVSCKASGYTFTSFGLNWVRQAPGQGLEWMGWISTYTGNTRYAQKFQGRVTMTTDTSTRTAYMELRSLRSDDTAVYYCATSATQHSGAAVPDGNYYYYAMDVWGQGTTVSVSS

SEQ ID NO: 907 - protein, 24 aa, Artificial Sequence
  Description of Artificial Sequence: Synthetic peptide
ATSATQHSGAAVPDGNYYYYAMDV

SEQ ID NO: 908 - DNA, 331 bp, Artificial Sequence
  Description of Artificial Sequence: Synthetic polynucleotide
cagtctgtgctgactcagccgccctcagtgtctggggccccaggtcagagggtcaccatctcctgcactgggagcagctccaacatcggggcaggttatgatgtacactggtaccagcagcttccaggaacagcccccaaagtcctcatttttggtaacaacaatcggccctcaggggtccctgaccgattctctggctccaagtctggcacctcagcctccctggccatcactgggctccaggctgacgatgaggctgattattactgccagtcctatgacaccagcctgagtgtggtattcggcggagggaccaagctgaccgtcctag

SEQ ID NO: 909 - protein, 110 aa, Artificial Sequence
  Description of Artificial Sequence: Synthetic polypeptide
QSVLTQPPSVSGAPGQRVTISCTGSSSNIGAGYDVHWYQQLPGTAPKVLIFGNNNRPSGVPDRFSGSKSGTSASLAITGLQADDEADYYCQSYDTSLSVVFGGGTKLTVL

SEQ ID NO: 910 - protein, 10 aa, Artificial Sequence
  Description of Artificial Sequence: Synthetic peptide
QSYDTSLSVV

SEQ ID NO: 911 - DNA, 390 bp, Artificial Sequence
  Description of Artificial Sequence: Synthetic polynucleotide
caggtgcagctgcaggagtcgggcccaggcctggtgaagccttcggggaccctgtccctcacctgcgctgtctctggtgactccatcaacagttttagctggtggacttgggtccgccagtccccagggaagggactggagtggattggggaaatgtatcatagtgggaacaccaactacagcccgtccctcaggggtcgagtcaccatatcagtagacgagtccaagaacgagttctccctgaaactgacctctgtgaccgccgcggacacggccatctattactgtgcgagacggacggtagggctgagggctgggaggttctcaaatatgtactactactactatgtggacgtctggggcaaagggacgacggtcaccgtctcctca

SEQ ID NO: 912 - protein, 130 aa, Artificial Sequence
  Description of Artificial Sequence: Synthetic polypeptide
QVQLQESGPGLVKPSGTLSLTCAVSGDSINSFSWWTWVRQSPGKGLEWIGEMYHSGNTNYSPSLRGRVTISVDESKNEFSLKLTSVTAADTAIYYCARRTVGLRAGRFSNMYYYYYVDVWGKGTTVTVSS

SEQ ID NO: 913 - protein, 23 aa, Artificial Sequence
  Description of Artificial Sequence: Synthetic peptide
ARRTVGLRAGRFSNMYYYYYVDV

SEQ ID NO: 914 - DNA, 329 bp, Artificial Sequence
  Description of Artificial Sequence: Synthetic polynucleotide
aattttatgctgactcagtcgcactctgtgtcggagtctccggggaagacggtaaccatctcctgcacccgcagcagtggcagcattgccagcaactatgtacagtggtaccagcagcgcccgggcagtgcccccaccactgtgatctatgaagataacctgagaccctctggggtccctgcccggttctctggctccgtcgacagctcctccaactccgcctccctcaccatctctggactggagactgaggacgaggctgactactactgtcagtcttatgatgacaaaaatgtaattttcggcggagggaccaagctgaccgtcct

SEQ ID NO: 915 - protein, 109 aa, Artificial Sequence
  Description of Artificial Sequence: Synthetic polypeptide
NFMLTQSHSVSESPGKTVTISCTRSSGSIASNYVQWYQQRPGSAPTTVIYEDNLRPSGVPARFSGSVDSSSNSASLTISGLETEDEADYYCQSYDDKNVIFGGGTKLTV

SEQ ID NO: 916 - protein, 9 aa, Artificial Sequence
  Description of Artificial Sequence: Synthetic peptide
QSYDDKNVI

SEQ ID NO: 917 - DNA, 348 bp, Artificial Sequence
  Description of Artificial Sequence: Synthetic polynucleotide
caggtgcagctggtggagtctgggggaagtgtggtccagcctgggaggtcccagagactctcctgtacagcgtctggattcaccttcagtcactatggcatacactgggtccgccaggctccaggcaaggggctggagtgggtggcagttatatggtatgatggaggtcagaaatattatgcagactccgtgaggggccgattcaccatctccagagacaattccaagagcacggtgtatttgcaaatggacagcctgagagtcgaggacacggctgtgtattactgtgcgagagatgggttcggtatggacgtctggggccaagggaccacggtcaccgtctcctca

SEQ ID NO: 918 - protein, 116 aa, Artificial Sequence
  Description of Artificial Sequence: Synthetic polypeptide
QVQLVESGGSVVQPGRSQRLSCTASGFTFSHYGIHWVRQAPGKGLEWVAVIWYDGGQKYYADSVRGRFTISRDNSKSTVYLQMDSLRVEDTAVYYCARDGFGMDVWGQGTTVTVSS

SEQ ID NO: 919 - protein, 9 aa, Artificial Sequence
  Description of Artificial Sequence: Synthetic peptide
ARDGFGMDV

SEQ ID NO: 920 - DNA, 331 bp, Artificial Sequence
  Description of Artificial Sequence: Synthetic polynucleotide
cagtctgtgctgactcagcctgcctccgtgtctggatcgcctggacagtcgatcaccatctcctgcactggaaccagcagtgacgttggtggttataatcatgtctcctggtaccaacatcacccaggcaaagcccccaaactcatgatttatgatgtcagtgatcggccctcaggggtttctagtcgcttctctggctccaagtctggcaatgtggcctccctgaccatctctgggctccaggctgaggacgaggctgattattactgcttctcatatacaagcagcttcactcgggtgttcggcggagggaccaggctgaccgtcctag

SEQ ID NO: 921 - protein, 110 aa, Artificial Sequence
  Description of Artificial Sequence: Synthetic polypeptide
QSVLTQPASVSGSPGQSITISCTGTSSDVGGYNHVSWYQHHPGKAPKLMIYDVSDRPSGVSSRFSGSKSGNVASLTISGLQAEDEADYYCFSYTSSFTRVFGGGTRLTVL

SEQ ID NO: 922 - protein, 10 aa, Artificial Sequence
  Description of Artificial Sequence: Synthetic peptide
FSYTSSFTRV

SEQ ID NO: 923 - DNA, 373 bp, Artificial Sequence
  Description of Artificial Sequence: Synthetic polynucleotide
caggtgcagctgcaggagtcgggcccacgactggtgaagccttaccagaccctgtccctcacctgcactgtctctggtggctccgtcggcagtggtgactactactggacctgggtccgccagcgcccagggaagggcctggagtggattgggtacctcttttccatcggcagtagtttttacaacccgtccctcaagagtcgagtttccttttcagtcgacgcgtctaggacccagttctccctgaacctaaactctgtgacagccgcggacacggccctgtattactgtgcgagaggggtggtgaggagtgaaataaccctctactaccttgactactggggccggggaaccatggtcaccgtctcgtcag

SEQ ID NO: 924 - protein, 124 aa, Artificial Sequence
  Description of Artificial Sequence: Synthetic polypeptide
QVQLQESGPRLVKPYQTLSLTCTVSGGSVGSGDYYWTWVRQRPGKGLEWIGYLFSIGSSFYNPSLKSRVSFSVDASRTQFSLNLNSVTAADTALYYCARGVVRSEITLYYLDYWGRGTMVTVSS

SEQ ID NO: 925 - protein, 16 aa, Artificial Sequence
  Description of Artificial Sequence: Synthetic peptide
ARGVVRSEITLYYLDY

SEQ ID NO: 926 - DNA, 334 bp, Artificial Sequence
  Description of Artificial Sequence: Synthetic polynucleotide
cagtctgtgctgactcagccaccctcagcgtctgggacccccgggcagagggtcaccatctcttgttctggaaacaactctaacatcggaaataattttgtatactggtatcagcaactcccaggttcggcccccaaactcctcatctataaaaataatcagcggccctcaggggtccctgaccgattcttcggctccaagtctggcacctcagcctccctggccatcagtgggctccggtccgaggatgaggctgattatcactgtgcatcgtgggatgacaggttgaatggtcatttggtattcggcggagggaccaagctgaccgtcctag

SEQ ID NO: 927 - protein, 111 aa, Artificial Sequence
  Description of Artificial Sequence: Synthetic polypeptide
QSVLTQPPSASGTPGQRVTISCSGNNSNIGNNFVYWYQQLPGSAPKLLIYKNNQRPSGVPDRFFGSKSGTSASLAISGLRSEDEADYHCASWDDRLNGHLVFGGGTKLTVL

SEQ ID NO: 928 - protein, 12 aa, Artificial Sequence
  Description of Artificial Sequence: Synthetic peptide
ASWDDRLNGHLV

SEQ ID NO: 929 - DNA, 349 bp, Artificial Sequence
  Description of Artificial Sequence: Synthetic polynucleotide
gaagtgcagctggtgcagtccggaacagagctgaaaaagcccggggagtccctgaggatctcctgtatgggttctggatacacctttacccactactggatcaactgggtgcgccagatgcccgggagaggtctggagtggatggggaggattgatcctagtgactcaaatgtccactacagcccgtccttccgaggccacatcaccatctcggttgacaactccatcaacactgcctacctacagtggaacagcctgcaggcctcggacaccgccatgtattactgtgcgagacaggggttcgggttcgacccctggggccagggaaccctggtcaccgtctcctcag

SEQ ID NO: 930 - protein, 116 aa, Artificial Sequence
  Description of Artificial Sequence: Synthetic polypeptide
EVQLVQSGTELKKPGESLRISCMGSGYTFTHYWINWVRQMPGRGLEWMGRIDPSDSNVHYSPSFRGHITISVDNSINTAYLQWNSLQASDTAMYYCARQGFGFDPWGQGTLVTVSS

SEQ ID NO: 931 - protein, 9 aa, Artificial Sequence
  Description of Artificial Sequence: Synthetic peptide
ARQGFGFDP

SEQ ID NO: 932 - DNA, 333 bp, Artificial Sequence
  Description of Artificial Sequence: Synthetic polynucleotide
cagtctgtgctgactcagcctcgctcagtgtccgggtctcctggacagtccgtcaccatctcctgcactggaaccagcagtgatgttggtggttataactatgtctcctggtatcaacaacacccaggcaaagcccccaaactcatgatttatgatgtcattgagcggccctctggggtccctgatcgcttctctggctccaagtctggcaatatggcctccctgaccatctctcgactccaggctgaggatgaggctgattattactgctgctcatatgcaggcacctacactttcagggtcttcggaactgggaccacggtcaccgtccta

SEQ ID NO: 933 - protein, 111 aa, Artificial Sequence
  Description of Artificial Sequence: Synthetic polypeptide
QSVLTQPRSVSGSPGQSVTISCTGTSSDVGGYNYVSWYQQHPGKAPKLMIYDVIERPSGVPDRFSGSKSGNMASLTISRLQAEDEADYYCCSYAGTYTFRVFGTGTTVTVL

SEQ ID NO: 934 - protein, 11 aa, Artificial Sequence
  Description of Artificial Sequence: Synthetic peptide
CSYAGTYTFRV

SEQ ID NO: 935 - DNA, 367 bp, Artificial Sequence
  Description of Artificial Sequence: Synthetic polynucleotide
caggtgcagctggtgcagtctggggctgaggtgaagaagcctggggcctcagtgaaggtctcctgcaaggcttctggatacactttcaccggctactatatacactgggtgcgacaggcccctggacaagggcttgagtggatgggatggatcaaccctaacagtggtggcacaattgcacggaagtttcagggcagggtcaccatgaccagggacacgtccatcagcacagtctacatggagctgaacaggctgagatctgacgacacggccgtgtattattgtgcgagagatggttacgacactttgacgggtcgggcatacctctaccactggggccagggcaccctggtcaccgtctcctcag

SEQ ID NO: 936 - protein, 122 aa, Artificial Sequence
  Description of Artificial Sequence: Synthetic polypeptide
QVQLVQSGAEVKKPGASVKVSCKASGYTFTGYYIHWVRQAPGQGLEWMGWINPNSGGTIARKFQGRVTMTRDTSISTVYMELNRLRSDDTAVYYCARDGYDTLTGRAYLYHWGQGTLVTVSS

SEQ ID NO: 937 - protein, 16 aa, Artificial Sequence
  Description of Artificial Sequence: Synthetic peptide
ARDGYDTLTGRAYLYH

SEQ ID NO: 938 - DNA, 331 bp, Artificial Sequence
  Description of Artificial Sequence: Synthetic polynucleotide
cagtctgtgctgactcagcctccctccgcgtccgggtcgcctggacagtcagtcaccatctcctgcactggaaccagcagtgacgttggtggttataactatgtcgcctggtaccaacatcacccaggcaaagcccccaaacttgtgatttatgaggtcaataagcggccctcaggggtccctgatcgcttctctggctccaagtctggcaacacggcctccctgaccgtctcggggctccagactgaggatgaggctgattattactgcagctcatatgcaggcagaaacaattgggtgttcggcggagggaccaaggtgaccgtcctag

SEQ ID NO: 939 - protein, 110 aa, Artificial Sequence
  Description of Artificial Sequence: Synthetic polypeptide
QSVLTQPPSASGSPGQSVTISCTGTSSDVGGYNYVAWYQHHPGKAPKLVIYEVNKRPSGVPDRFSGSKSGNTASLTVSGLQTEDEADYYCSSYAGRNNWVFGGGTKVTVL

SEQ ID NO: 940 - protein, 10 aa, Artificial Sequence
  Description of Artificial Sequence: Synthetic peptide
SSYAGRNNWV

SEQ ID NO: 941 - DNA, 376 bp, Artificial Sequence
  Description of Artificial Sequence: Synthetic polynucleotide
cagctgcagctgcaggagtccggctcaggactggtgaagccttcacagaccctgtccctcacctgcgctgtctctggtggctccatcagcaggggtggttactcctggagctggatccggcagccaccagggaagggcctggagtggattgggtacgtctatcatggtgggaaaacttactacaatccgtccctgaagagacgactcaccatttcagtagacagctccaagaacctgttctccctgaagttgacttctgtgacggccgcggacacggccgtgtattactgtgccagaggcgattggtatacaggctcgccgagggctgatgtttttgatgtgtggagcccagggacaatggtcaccgtctcctcag

SEQ ID NO: 942 - protein, 125 aa, Artificial Sequence
  Description of Artificial Sequence: Synthetic polypeptide
QLQLQESGSGLVKPSQTLSLTCAVSGGSISRGGYSWSWIRQPPGKGLEWIGYVYHGGKTYYNPSLKRRLTISVDSSKNLFSLKLTSVTAADTAVYYCARGDWYTGSPRADVFDVWSPGTMVTVSS

SEQ ID NO: 943 - protein, 17 aa, Artificial Sequence
  Description of Artificial Sequence: Synthetic peptide
ARGDWYTGSPRADVFDV

SEQ ID NO: 944 - DNA, 334 bp, Artificial Sequence
  Description of Artificial Sequence: Synthetic polynucleotide
cagtctgtgctgactcagccgccctcagtgtctggggccccagggcagagggtcaccatctcctgcactgggagcagctccaacgtcggggcagattatgatttatactggtaccagcaacttccaggaaaggcccccagactcctcatatatggtgacaactatcggccctcaggggtccctgaccgattctctggctccaagtctggcacctccgcctccctggccatcactgggctccaggttgacgatgaggctgattattactgccagtcctatgacagcagcctgagtgtcgtggtattcggcggggggaccaagctgaccgtcctag

SEQ ID NO: 945 - protein, 111 aa, Artificial Sequence
  Description of Artificial Sequence: Synthetic polypeptide
QSVLTQPPSVSGAPGQRVTISCTGSSSNVGADYDLYWYQQLPGKAPRLLIYGDNYRPSGVPDRFSGSKSGTSASLAITGLQVDDEADYYCQSYDSSLSVVVFGGGTKLTVL

SEQ ID NO: 946 - protein, 11 aa, Artificial Sequence
  Description of Artificial Sequence: Synthetic peptide
QSYDSSLSVVV

SEQ ID NO: 947 - DNA, 361 bp, Artificial Sequence
  Description of Artificial Sequence: Synthetic polynucleotide
caggtgcagctggtggagtctgggggaggcgtggtccagcctgggaggtccctgagactctcctgtgcagcgtctggattcagttttagtagctatggcatgcagtgggtccgccaggctccaggcaaggggctggagtgggtggcagttatatggtatgatggaagtgataaatactatgcagagtccgtgaagggccgattcaccatctccagagacaattccaaggacacactatttctgcaaatgaacagcctgggagccgaggacacggctgtgtattactgtgcgagaggtcaggggaacagttatggccccattgacttctggggccagggaaccctggtcaccgtctcctcag

SEQ ID NO: 948 - protein, 120 aa, Artificial Sequence
  Description of Artificial Sequence: Synthetic polypeptide
QVQLVESGGGVVQPGRSLRLSCAASGFSFSSYGMQWVRQAPGKGLEWVAVIWYDGSDKYYAESVKGRFTISRDNSKDTLFLQMNSLGAEDTAVYYCARGQGNSYGPIDFWGQGTLVTVSS

SEQ ID NO: 949 - protein, 13 aa, Artificial Sequence
  Description of Artificial Sequence: Synthetic peptide
ARGQGNSYGPIDF

SEQ ID NO: 950 - DNA, 332 bp, Artificial Sequence
  Description of Artificial Sequence: Synthetic polynucleotide
cagtctgtgctgactcagtcatcctcagcctctgcttccctgggatcctcggtcaagctcacctgcactctgagcagtgggcacagaaactacatcgtcacatggcatcagcagcagccaggaaaggcccctcgacacttgatgaagcttgaaagtagtggaagttacaacaaggggagcggaattcctgatcgcttctcaggctccagctctgggtctgaccgctacctcaccatctccaacctccagtctgaggatgaggctgattattactgtgagacctgggacagtaagactcgggtgttcggcggagggaccagactgaccgtcct

SEQ ID NO: 951 - protein, 110 aa, Artificial Sequence
  Description of Artificial Sequence: Synthetic polypeptide
QSVLTQSSSASASLGSSVKLTCTLSSGHRNYIVTWHQQQPGKAPRHLMKLESSGSYNKGSGIPDRFSGSSSGSDRYLTISNLQSEDEADYYCETWDSKTRVFGGGTRLTV

SEQ ID NO: 952 - protein, 9 aa, Artificial Sequence
  Description of Artificial Sequence: Synthetic peptide
ETWDSKTRV

SEQ ID NO: 953 - DNA, 346 bp, Artificial Sequence
  Description of Artificial Sequence: Synthetic polynucleotide
caggtgcagctggtggagtctgggggaggcgtggtccagcctgggaggtccctgagactctcctgtgcagcctctggattcaccttcactcactatgctatacactgggtccgccaggctccagacaaggggctggagtgggttggagttgcatcgtttgatggaaacaagaaatatggagtctccgcggaggggcggttcaccatctccagagacgattccaagaacacggtgtatctgcaaatgaacagactcagatcggaggacacggctatttattactgcgtgagactgagcttcgggttcgacccctggggccagggaaccctggtcactgtctcctcag

SEQ ID NO: 954 - protein, 115 aa, Artificial Sequence
  Description of Artificial Sequence: Synthetic polypeptide
QVQLVESGGGVVQPGRSLRLSCAASGFTFTHYAIHWVRQAPDKGLEWVGVASFDGNKKYGVSAEGRFTISRDDSKNTVYLQMNRLRSEDTAIYYCVRLSFGFDPWGQGTLVTVSS

SEQ ID NO: 955 - protein, 9 aa, Artificial Sequence
  Description of Artificial Sequence: Synthetic peptide
VRLSFGFDP

SEQ ID NO: 956 - DNA, 329 bp, Artificial Sequence
  Description of Artificial Sequence: Synthetic polynucleotide
cagtctgtgctgactcagcctcgctcagtgtccgggtctcctagacagtcagtcaccatctcctgcattggaaccagcagtgatattggtagttataattatgtctcctggtaccaacaccacccaggcaaagccccccaactcatgatttatgatgtcagtgagcggccctcagggatccctgatcgcttctctggctccaagtctggcaacacggcctccctgaccatctctgggctccaggctgaggatgaggccgattattattgctgctcatatgcaggtagtttcacttatgtcttcggaactgggaccaaggtcaccgtcct

SEQ ID NO: 957 - protein, 109 aa, Artificial Sequence
  Description of Artificial Sequence: Synthetic polypeptide
QSVLTQPRSVSGSPRQSVTISCIGTSSDIGSYNYVSWYQHHPGKAPQLMIYDVSERPSGIPDRFSGSKSGNTASLTISGLQAEDEADYYCCSYAGSFTYVFGTGTKVTV

SEQ ID NO: 958 - protein, 10 aa, Artificial Sequence
  Description of Artificial Sequence: Synthetic peptide
CSYAGSFTYV

SEQ ID NO: 959 - DNA, 361 bp, Artificial Sequence
  Description of Artificial Sequence: Synthetic polynucleotide
caggtgcagctggtggagtctgggggaggcgtggtccagcctgggaggtccctgagactctcctgtgcagcgtctggattcaccttcagtagctatgggatgcactgggtccgccaggctccaggcaaggggctggagtgggtggcagctatttggtatgacggaagtgataaatactatgcagactccgtgaggggccgattcagcatctccagagacaattccaagagcacgctgtatctgcaaatgaacagcctgagagccgaggacacggctgtgtattactgtgcgagaagcggtggtaactcctttggtgccgttgactactggggccagggaatcctggtcgccgtctccgcag

SEQ ID NO: 960 - protein, 120 aa, Artificial Sequence
  Description of Artificial Sequence: Synthetic polypeptide
QVQLVESGGGVVQPGRSLRLSCAASGFTFSSYGMHWVRQAPGKGLEWVAAIWYDGSDKYYADSVRGRFSISRDNSKSTLYLQMNSLRAEDTAVYYCARSGGNSFGAVDYWGQGILVAVSA

SEQ ID NO: 961 - protein, 13 aa, Artificial Sequence
  Description of Artificial Sequence: Synthetic peptide
ARSGGNSFGAVDY

SEQ ID NO: 962 - DNA, 334 bp, Artificial Sequence
  Description of Artificial Sequence: Synthetic polynucleotide
cagtctgtgctgactcagtcgccctctgcctctgcctccctgggagcctcggtcaagctcacctgcactctgagcagtgggcacagcaggaacgtcatcgcatggcatcagcagcagccagagaagggccctcgatacttgatgaagtttaacagtgatggcagccacaccaagggggacgggatccctgatcgcttctcaggctccagctctggggctgagcgctacctcaccatctccagcctccaggctgaggatgaggctgactattactgtcagacctggggcactggcattctggtattcggcggagggaccaagctgaccgtcctag

SEQ ID NO: 963 - protein, 111 aa, Artificial Sequence
  Description of Artificial Sequence: Synthetic polypeptide
QSVLTQSPSASASLGASVKLTCTLSSGHSRNVIAWHQQQPEKGPRYLMKFNSDGSHTKGDGIPDRFSGSSSGAERYLTISSLQAEDEADYYCQTWGTGILVFGGGTKLTVL

SEQ ID NO: 964 - protein, 9 aa, Artificial Sequence
  Description of Artificial Sequence: Synthetic peptide
QTWGTGILV

SEQ ID NO: 965 - DNA, 373 bp, Artificial Sequence
  Description of Artificial Sequence: Synthetic polynucleotide
caggtgcagctggtggagtctgggggaggcgtggtccagcctgggaggtccctgagactctcctgtgcagcgtctggattcaacttcaatgattatggcatgcactgggtccgccaggctccaggcaaggggctggagtgggtggcagttatatggtctgatggaactaatacatactatgcagactccgtggagggccgatccaccatctccagagacaattccaagaacacactgtatctgcaaatgaacagcctgagagccgaggacacagctgtatattactgtgcgagcaattatggatacctttgggggagttatcgctgggcccttcattactggggccagggaaccctggtcaccgtctcctcag

SEQ ID NO: 966 - protein, 124 aa, Artificial Sequence
  Description of Artificial Sequence: Synthetic polypeptide
QVQLVESGGGVVQPGRSLRLSCAASGFNFNDYGMHWVRQAPGKGLEWVAVIWSDGTNTYYADSVEGRSTISRDNSKNTLYLQMNSLRAEDTAVYYCASNYGYLWGSYRWALHYWGQGTLVTVSS

SEQ ID NO: 967 - protein, 17 aa, Artificial Sequence
  Description of Artificial Sequence: Synthetic peptide
ASNYGYLWGSYRWALHY

SEQ ID NO: 968 - DNA, 328 bp, Artificial Sequence
  Description of Artificial Sequence: Synthetic polynucleotide
tcctatgtgctgactcagccaccctcggtgtcagtggccccaggacagacggccagggttacctgtggggggaacaacattggaagtaaaagtgtacactggtaccagcagaagccaggccaggcccctcttttggtcgtctatgataataccgaccggccctcagggatccctgagcgattctctggctccaactctgggaacacggccaccctgaccatcagcagggtcgaagccggggatgaggccgactatcactgtcaggtgtgggagagcagtcgtgatcatgcgaggatgattttcggcggagggaccaagctgaccgtcc

SEQ ID NO: 969 - protein, 109 aa, Artificial Sequence
  Description of Artificial Sequence: Synthetic polypeptide
SYVLTQPPSVSVAPGQTARVTCGGNNIGSKSVHWYQQKPGQAPLLVVYDNTDRPSGIPERFSGSNSGNTATLTISRVEAGDEADYHCQVWESSRDHARMIFGGGTKLTV

SEQ ID NO: 970 - protein, 13 aa, Artificial Sequence
  Description of Artificial Sequence: Synthetic peptide
QVWESSRDHARMI

SEQ ID NO: 971 - DNA, 370 bp, Artificial Sequence
  Description of Artificial Sequence: Synthetic polynucleotide
gaggtgcagctggtggagtccgggggaggcctggtccagcctggggggtccctgaaactctcctgtgcagcctctgggttcaccttcagtggctctactatgcactgggtccgccaggcttccgggaaagggctggagtgggttggccgcattagaggcaattttaacaattacgcgacagcatatgctgcgtcggtgaaaggcaggttcaccatctccagagatgattcaaggaacacggcgtatctgcaaatgaacaacctgaaaaccgacgacacggccgtatattattgtactcgtccattttttcaagcaggtggaacggagtttgactactggggccagggaaccctggtcaccgtttcttcag

SEQ ID NO: 972 - protein, 123 aa, Artificial Sequence
  Description of Artificial Sequence: Synthetic polypeptide
EVQLVESGGGLVQPGGSLKLSCAASGFTFSGSTMHWVRQASGKGLEWVGRIRGNFNNYATAYAASVKGRFTISRDDSRNTAYLQMNNLKTDDTAVYYCTRPFFQAGGTEFDYWGQGTLVTVSS

SEQ ID NO: 973 - protein, 14 aa, Artificial Sequence
  Description of Artificial Sequence: Synthetic peptide
TRPFFQAGGTEFDY

SEQ ID NO: 974 - DNA, 336 bp, Artificial Sequence
  Description of Artificial Sequence: Synthetic polynucleotide
cagtctgtgctgactcagcctggctccgtgtctgggtctcctggacagtcgatcaccatctcctgcactggaaccagcagtgacgttggtgcttataactatgtctcctggtaccaacaacacccaggcaaagcccccaaactcatgatttatgaagtcaataatcgcctctcaggggtttcttctcgcttctctggctccaagtctggcaacacggcctccctgaccatctctgggctccaggctgaggacgaggctgattattattgcagctcatatacaggcagcagtgctctcgaagtggtcttcggcgaagggaccaagctgaccgtccta

SEQ ID NO: 975 - protein, 112 aa, Artificial Sequence
  Description of Artificial Sequence: Synthetic polypeptide
QSVLTQPGSVSGSPGQSITISCTGTSSDVGAYNYVSWYQQHPGKAPKLMIYEVNNRLSGVSSRFSGSKSGNTASLTISGLQAEDEADYYCSSYTGSSALEVVFGEGTKLTVL

SEQ ID NO: 976 - protein, 12 aa, Artificial Sequence
  Description of Artificial Sequence: Synthetic peptide
SSYTGSSALEVV

SEQ ID NO: 977 - DNA, 355 bp, Artificial Sequence
  Description of Artificial Sequence: Synthetic polynucleotide
caggtgcagctggtggagtctgggggaggcgtggtccagcctgggaggtccctgagactctcctgcgcagcctctggattcaccttcagtcactatacaatgcactgggtccgccaggctccaggcaaggggctggagtgggtggcagttatatcatatgatggaagtactaaatattacgcagactccgtgaagggccgattcaccatctccagagacaactccaagaacacactatatctccaagtgaacagcctgagagctcaggacacggctgtatattactgtgtgagaggcttccccgccggtgagtgggactcctggggccagggaatcctggtcaccgtctcctcag

SEQ ID NO: 978 - protein, 118 aa, Artificial Sequence
  Description of Artificial Sequence: Synthetic polypeptide
QVQLVESGGGVVQPGRSLRLSCAASGFTFSHYTMHWVRQAPGKGLEWVAVISYDGSTKYYADSVKGRFTISRDNSKNTLYLQVNSLRAQDTAVYYCVRGFPAGEWDSWGQGILVTVSS

SEQ ID NO: 979 - protein, 11 aa, Artificial Sequence
  Description of Artificial Sequence: Synthetic peptide
VRGFPAGEWDS

SEQ ID NO: 980 - DNA, 331 bp, Artificial Sequence
  Description of Artificial Sequence: Synthetic polynucleotide
cagtctgtgctgactcagcctgcctccgtgtctgggtctcctggacagtcgatcaccgtctcctgcactggaaccagcagtgactttggcacttataattatgtctcttggttccaacaactcccaggcaaagcccccaaactcattctttatgaggtcagtaatcggccctcaggggtctctaatcgcttctctggctccaagtctggcaacacggcctccctgtccatctctgggctccaggctgaggacgaggctgattattactgcctctcatatacaagtaccaacacctgggtgttcggcggagggaccaaggtgaccgtcctag

SEQ ID NO: 981 - protein, 110 aa, Artificial Sequence
  Description of Artificial Sequence: Synthetic polypeptide
QSVLTQPASVSGSPGQSITVSCTGTSSDFGTYNYVSWFQQLPGKAPKLILYEVSNRPSGVSNRFSGSKSGNTASLSISGLQAEDEADYYCLSYTSTNTWVFGGGTKVTVL

SEQ ID NO: 982 - protein, 10 aa, Artificial Sequence
  Description of Artificial Sequence: Synthetic peptide
LSYTSTNTWV

SEQ ID NO: 983 - DNA, 393 bp, Artificial Sequence
  Description of Artificial Sequence: Synthetic polynucleotide
caggtgcagctggtggagtctgggggaggcgtggtccagcctgggaggtccctgagactctcctgtgcagcctctggattcactttcaggagtcatggcatgcactgggtccgccaggctccaggcaaggggctggagtgggtggcagttatatcagatgatggatctaaaacattctatgcagactccgtgaagggccgattcaccatgtccagagacaactccaagaacacgctgtatgtgcaaatgaacagcttgagaactgaggacacggctgtatattattgtgcgaaggatcggggttcttttaattacctttgggaaactgtccgcaacttctaccactacggaacggacgtctggggccaagggactacggtcaccgtctcctca

SEQ ID NO: 984 - protein, 131 aa, Artificial Sequence
  Description of Artificial Sequence: Synthetic polypeptide
QVQLVESGGGVVQPGRSLRLSCAASGFTFRSHGMHWVRQAPGKGLEWVAVISDDGSKTFYADSVKGRFTMSRDNSKNTLYVQMNSLRTEDTAVYYCAKDRGSFNYLWETVRNFYHYGTDVWGQGTTVTVSS

SEQ ID NO: 985 - protein, 24 aa, Artificial Sequence
  Description of Artificial Sequence: Synthetic peptide
AKDRGSFNYLWETVRNFYHYGTDV

SEQ ID NO: 986 - DNA, 331 bp, Artificial Sequence
  Description of Artificial Sequence: Synthetic polynucleotide
cagtctgtgttgactcagccgccctcagtgtcggcggccccaggacagaaggtcaccatctcctgctctggaagcagcttcaacattgggaataatcatgtatcgtggtatcagcaattcccaggaacaggccccaaactcctcatttatgacagtgataagcgaccctcagggattcctgaccgattctctggctccaagtctggcacgtcagccaccctggccatcaccggactccagactggagacgaggccgattactactgcgaaacatgggatagcagcctgagtgctggggtgttcggcggagggaccaaggtgaccgtcctag

SEQ ID NO: 987 - protein, 110 aa, Artificial Sequence
  Description of Artificial Sequence: Synthetic polypeptide
QSVLTQPPSVSAAPGQKVTISCSGSSFNIGNNHVSWYQQFPGTGPKLLIYDSDKRPSGIPDRFSGSKSGTSATLAITGLQTGDEADYYCETWDSSLSAGVFGGGTKVTVL

SEQ ID NO: 988 - protein, 11 aa, Artificial Sequence
  Description of Artificial Sequence: Synthetic peptide
ETWDSSLSAGV

SEQ ID NO: 989 - DNA, 361 bp, Artificial Sequence
  Description of Artificial Sequence: Synthetic polynucleotide
caggtgcagctggtggagtctgggggaggcgtggtcccgcctgggaggtccctgagactctcctgtgcagcctccggattcaccttcagtcactatggtatgcagtgggtccgccaggctccaggcaaggggctggagtggttggcaggtgtatcatatgatggaagcggtaaatattatggagacgccgtgaagggccgactcaccatctccagagacaattccaagaacacgatgtatctgcaattgaacagtctaagacctgaggacacggctctttattattgtgcgcgagtgcaaggtggcagtggctgggcgtcggaccactggggccagggaaccctggtcaccgtctcctcag

SEQ ID NO: 990 - protein, 120 aa, Artificial Sequence
  Description of Artificial Sequence: Synthetic polypeptide
QVQLVESGGGVVPPGRSLRLSCAASGFTFSHYGMQWVRQAPGKGLEWLAGVSYDGSGKYYGDAVKGRLTISRDNSKNTMYLQLNSLRPEDTALYYCARVQGGSGWASDHWGQGTLVTVSS

SEQ ID NO: 991 - protein, 13 aa, Artificial Sequence
  Description of Artificial Sequence: Synthetic peptide
ARVQGGSGWASDH

SEQ ID NO: 992 - DNA, 331 bp, Artificial Sequence
  Description of Artificial Sequence: Synthetic polynucleotide
cagtctgtgctgactcagcctgcctccgtgtctgggtctcctggacagtcgatcaccatttcctgcactgggaccagcagtgacgttggtggttatgattatgtcacctggtaccaacaccacccaggcaaagccccccgactcctgatttatgaggtcagtaatcggccctcaggggtttctaatcgcttctctggctccaagtctggcaacacggcctccctgaccatctctgggctccaggctgaggacgaggctgattattactgcgcttcatataccagtcggggcacttcggtgttcggcggagggaccaaactgaccgtcttag

SEQ ID NO: 993 - protein, 110 aa, Artificial Sequence
  Description of Artificial Sequence: Synthetic polypeptide
QSVLTQPASVSGSPGQSITISCTGTSSDVGGYDYVTWYQHHPGKAPRLLIYEVSNRPSGVSNRFSGSKSGNTASLTISGLQAEDEADYYCASYTSRGTSVFGGGTKLTVL

SEQ ID NO: 994 - protein, 10 aa, Artificial Sequence
  Description of Artificial Sequence: Synthetic peptide
ASYTSRGTSV

SEQ ID NO: 995 - DNA, 381 bp, Artificial Sequence
  Description of Artificial Sequence: Synthetic polynucleotide
caggtgcagctggtgcagtctggggctgaggtgaagaagcctgggtcctcggtgaaggtctcctgcgaggcttctggaggcaccttcagaagctatgctatcagctgggtgcgacaggcccctggacaagggcttgagtggatgggagggatcatccccatctttggtacagcaaactacgcacagaggttccaggacagagtcacgattaccgcggacgaatccacgagcacagcctacatggagttgagcagcctgagatccgcggacacggccgtgtattactgtgccgttagagattgtagtggtaatagttgctacaccaggccgttctacggtctggacgtctggggccaagggaccacggtcaccgtctcctca

SEQ ID NO: 996 - protein, 127 aa, Artificial Sequence
  Description of Artificial Sequence: Synthetic polypeptide
QVQLVQSGAEVKKPGSSVKVSCEASGGTFRSYAISWVRQAPGQGLEWMGGIIPIFGTANYAQRFQDRVTITADESTSTAYMELSSLRSADTAVYYCAVRDCSGNSCYTRPFYGLDVWGQGTTVTVSS

SEQ ID NO: 997 - protein, 20 aa, Artificial Sequence
  Description of Artificial Sequence: Synthetic peptide
AVRDCSGNSCYTRPFYGLDV

SEQ ID NO: 998 - DNA, 325 bp, Artificial Sequence
  Description of Artificial Sequence: Synthetic polynucleotide
tcctatgtgctgactcagccaccctcggtgtcagtggccccaggacagacggctaggattacctgtgggggaaacaacattggaagtaaaagtgtgtattggtaccagcagaagccaggccaggcccctgtgctggtcgtctatgatgaaaacgaccggccctcagggatccctgagcgattctctggctccaactctgggaacacggccaccctgaccatcagcagggtcgaagtcggggatgaggccgactatcactgtcaggtgtgggaaagcagtcgtgatcatgtgttattcggcggagggaccaagctgaccgtcctag

SEQ ID NO: 999 - protein, 108 aa, Artificial Sequence
  Description of Artificial Sequence: Synthetic polypeptide
SYVLTQPPSVSVAPGQTARITCGGNNIGSKSVYWYQQKPGQAPVLVVYDENDRPSGIPERFSGSNSGNTATLTISRVEVGDEADYHCQVWESSRDHVLFGGGTKLTVL

SEQ ID NO: 1000 - protein, 11 aa, Artificial Sequence
  Description of Artificial Sequence: Synthetic peptide
QVWESSRDHVL

SEQ ID NO: 1001 - DNA, 363 bp, Artificial Sequence
  Description of Artificial Sequence: Synthetic polynucleotide
caggtgcagctggtggagtctgggggaggcgtggtccagcctgggaggtccctgagactctcttgtgcagcgtctggattcaccttcagtagctatggcatgcactgggtccgccaggctccaggcaaggggctggagtgggtggcagttatatggtatgatggaactaataaatactatgcagactccgtgaagggccgattcaccatctccagagacaattccaagaacacgctgtatctgcaaatgaacagcctgagagccgaggacacggctctgtattactgtgcgaaagggattaccccctactattactacggtatggacgtctggggccaagggaccacggtcaccgtctcctca

SEQ ID NO: 1002 - protein, 121 aa, Artificial Sequence
  Description of Artificial Sequence: Synthetic polypeptide
QVQLVESGGGVVQPGRSLRLSCAASGFTFSSYGMHWVRQAPGKGLEWVAVIWYDGTNKYYADSVKGRFTISRDNSKNTLYLQMNSLRAEDTALYYCAKGITPYYYYGMDVWGQGTTVTVSS

SEQ ID NO: 1003 - protein, 14 aa, Artificial Sequence
  Description of Artificial Sequence: Synthetic peptide
AKGITPYYYYGMDV

SEQ ID NO: 1004 - DNA, 334 bp, Artificial Sequence
  Description of Artificial Sequence: Synthetic polynucleotide
cagtctgtgctgactcagccgccctcagtgtctggggccccagggcagagggtcaccatctcctgcactgggagcagctccaacatcggggcaggttatgatgtacagtggtaccagcagcttccaagaacagcccccaaactcctcatctatgctaacagcaatcggccctcaggggtccctgaccgattctctggctccaagtctggcacctcagcctccctggccatcactgggctccaggctgaggatgaggctgattattactgccagtcctatgacagcagcctgagtggttatgtcttcggaactgggaccaaggtcaccgtcctag

SEQ ID NO: 1005 - protein, 111 aa, Artificial Sequence
  Description of Artificial Sequence: Synthetic polypeptide
QSVLTQPPSVSGAPGQRVTISCTGSSSNIGAGYDVQWYQQLPRTAPKLLIYANSNRPSGVPDRFSGSKSGTSASLAITGLQAEDEADYYCQSYDSSLSGYVFGTGTKVTVL

SEQ ID NO: 1006 - protein, 11 aa, Artificial Sequence
  Description of Artificial Sequence: Synthetic peptide
QSYDSSLSGYV

SEQ ID NO: 1007 - DNA, 371 bp, Artificial Sequence
  Description of Artificial Sequence: Synthetic polynucleotide
caggtgcagctgcaggagtcgggcccaagactggtgaagacttcacagaccctggccctcacctgcagtgtctctggtgacctcatcagcggtggtggttattactggacttggatccgccagcacccagggaagggcctggagtggattgggtacatctataacggtcagagtccctattacaatccgtccctcaagagtcgacttatcatatcagcagacaagtctaggaaccagttttccctgaggctgaggtctgtgactgccgcggacacggccgtatattactgtgcgagaggaatagtggtgagtgaaattacactctactaccttgacaactggggacatggaagcctggtcaccgtctcctc

SEQ ID NO: 1008 - protein, 123 aa, Artificial Sequence
  Description of Artificial Sequence: Synthetic polypeptide
QVQLQESGPRLVKTSQTLALTCSVSGDLISGGGYYWTWIRQHPGKGLEWIGYIYNGQSPYYNPSLKSRLIISADKSRNQFSLRLRSVTAADTAVYYCARGIVVSEITLYYLDNWGHGSLVTVS

SEQ ID NO: 1009 - protein, 16 aa, Artificial Sequence
  Description of Artificial Sequence: Synthetic peptide
ARGIVVSEITLYYLDN

SEQ ID NO: 1010 - DNA, 334 bp, Artificial Sequence
  Description of Artificial Sequence: Synthetic polynucleotide
cagtctgtgctgactcagccaccctcagcgtctgggacccccgggcagagggtcaccatctcttgttctggaaacagctccaacatcggaaataattatgtttactggtaccagcagcttccagggacggcccccaaactcatcatctataggaataatcagcggccctcaggggtccctgaccggttctctggctccaagtctggcacctcagcctccctggccatcaatgggctccggtccgaggatgaggccgattatcactgtgcatcatgggatgacagcctaaatggtcgttatgtcttcggaagtgggaccgaggtcaccgtcctag

SEQ ID NO: 1011 - protein, 111 aa, Artificial Sequence
  Description of Artificial Sequence: Synthetic polypeptide
QSVLTQPPSASGTPGQRVTISCSGNSSNIGNNYVYWYQQLPGTAPKLIIYRNNQRPSGVPDRFSGSKSGTSASLAINGLRSEDEADYHCASWDDSLNGRYVFGSGTEVTVL

SEQ ID NO: 1012 - protein, 12 aa, Artificial Sequence
  Description of Artificial Sequence: Synthetic peptide
ASWDDSLNGRYV

SEQ ID NO: 1013 - DNA, 361 bp, Artificial Sequence
  Description of Artificial Sequence: Synthetic polynucleotide
caggtgcagctggtgcagtctggggctgaggtgaggaagcctggggcctcagtgaaagtctcctgcaagacttctggatacaccttcaccggctactatatacactgggtgcgacaggcccctggacgaggacttgagtggatgggttgggtcaaccctaacagtggtgacacagactttgcacagagctttcagggctgggtcaccatgtccagggacacgtccaccgccacagcctacatggaactgaccagactgaaatctgacgacacggccgtgtattactgtgcgacatatagtcacagctggtcaggatttttcgacaagtggggccagggaaccctggtcaccgtctcctcag

SEQ ID NO: 1014 - protein, 120 aa, Artificial Sequence
  Description of Artificial Sequence: Synthetic polypeptide
QVQLVQSGAEVRKPGASVKVSCKTSGYTFTGYYIHWVRQAPGRGLEWMGWVNPNSGDTDFAQSFQGWVTMSRDTSTATAYMELTRLKSDDTAVYYCATYSHSWSGFFDKWGQGTLVTVSS

SEQ ID NO: 1015 - protein, 13 aa, Artificial Sequence
  Description of Artificial Sequence: Synthetic peptide
ATYSHSWSGFFDK

SEQ ID NO: 1016 - DNA, 329 bp, Artificial Sequence
  Description of Artificial Sequence: Synthetic polynucleotide
cagtctgtgctgactcagccagcctccgtgtctggatctcctggacagtcgatcaccatctcctgcactggaaccagcagtgatgttgggaattataaccttgtctcctggtaccagcttcacccaggcaaagcccccaaactgatgatttatgaagtcactaagcggccctcaggggtttctaatcgcttcactggctccaagtctggcaacacggcctccctgacaatctctgggctccaggctgaggacgaggctgattattgttgttcctcatatgcacccaggggcactgtggtattcggcggagggaccaagctgaccgtcct

SEQ ID NO: 1017 - protein, 109 aa, Artificial Sequence
  Description of Artificial Sequence: Synthetic polypeptide
QSVLTQPASVSGSPGQSITISCTGTSSDVGNYNLVSWYQLHPGKAPKLMIYEVTKRPSGVSNRFTGSKSGNTASLTISGLQAEDEADYCCSSYAPRGTVVFGGGTKLTV

SEQ ID NO: 1018 - protein, 10 aa, Artificial Sequence
  Description of Artificial Sequence: Synthetic peptide
SSYAPRGTVV

SEQ ID NO: 1019 - DNA, 354 bp, Artificial Sequence
  Description of Artificial Sequence: Synthetic polynucleotide
caggtgcagctggtggagtctgggggaggtttggtcaagcctggagggtctctgagactctcctgtgcagcctctggattcaccttcagcgacttttatataagttgggtccgccaggctccagggaaggggctggagtggatttcatacattactagtactagtagttacacaaactacgcagactctgtgaagggccgatttaccgtctccagagacaacgccaagaactcagtgtatctgcaaatgaatggcctgagagccgaagacacggctgtgtattactgtgcgagagatctgcactactactacatggacgtctggggcaaagggaccacggtcaccgtctcctca

SEQ ID NO: 1020 - protein, 118 aa, Artificial Sequence
  Description of Artificial Sequence: Synthetic polypeptide
QVQLVESGGGLVKPGGSLRLSCAASGFTFSDFYISWVRQAPGKGLEWISYITSTSSYTNYADSVKGRFTVSRDNAKNSVYLQMNGLRAEDTAVYYCARDLHYYYMDVWGKGTTVTVSS

SEQ ID NO: 1021 - protein, 11 aa, Artificial Sequence
  Description of Artificial Sequence: Synthetic peptide
ARDLHYYYMDV

SEQ ID NO: 1022 - DNA, 337 bp, Artificial Sequence
  Description of Artificial Sequence: Synthetic polynucleotide
cagtctgtgctgactcagccgccctcagtgtctggggccccagggcagagggtcaccatctcctgcactgggagccgctccaacatcgggtcaggttatgatgtacactggtaccagcagtttccaggaacagcccccaaactcctcatctatcgtagtaacaatcggccctcaggggtccctgaccgattctctggctccaggtctggcacctcagcctccctgaccatcactgggctcctggctgaggatgaggctgattattactgccagtcctatgaaaacagtctgagtggtgcgagaatattcggcggagggaccaagctgaccgtcctag

SEQ ID NO: 1023 - protein, 112 aa, Artificial Sequence
  Description of Artificial Sequence: Synthetic polypeptide
QSVLTQPPSVSGAPGQRVTISCTGSRSNIGSGYDVHWYQQFPGTAPKLLIYRSNNRPSGVPDRFSGSRSGTSASLTITGLLAEDEADYYCQSYENSLSGARIFGGGTKLTVL

SEQ ID NO: 1024 - protein, 12 aa, Artificial Sequence
  Description of Artificial Sequence: Synthetic peptide
QSYENSLSGARI

SEQ ID NO: 1025 - DNA, 358 bp, Artificial Sequence
  Description of Artificial Sequence: Synthetic polynucleotide
caggtgcagctggtgcagtctggggccgaggtgaagaagcctgggtcctcggtgaaggtctcctgcaggacttatggaggcaccttcagcacctttgctatcagctgggtgcggcaggcccctggacaagggcttgagtggatgggagggatcacacctatctttggtacaccaaactacgcacagaagttccagggcagagtcacgattaccgcggacgaatccacgagcacagtctacatgcagttgagcagcctgagatctgaagacacggccgtgtattactgtgcgagagaagggggaggtactagagactttgactattggggccagggaaccctggtcaccgtctcctcag

SEQ ID NO: 1026 - protein, 119 aa, Artificial Sequence
  Description of Artificial Sequence: Synthetic polypeptide
QVQLVQSGAEVKKPGSSVKVSCRTYGGTFSTFAISWVRQAPGQGLEWMGGITPIFGTPNYAQKFQGRVTITADESTSTVYMQLSSLRSEDTAVYYCAREGGGTRDFDYWGQGTLVTVSS

SEQ ID NO: 1027 - protein, 12 aa, Artificial Sequence
  Description of Artificial Sequence: Synthetic peptide
AREGGGTRDFDY

SEQ ID NO: 1028 - DNA, 322 bp, Artificial Sequence
  Description of Artificial Sequence: Synthetic polynucleotide
  modified_base (316)..(316): a, c, t, g, unknown or other
tcctatgagctgactcagccactctcagtgtcagtggccctgggacagacggccaggattacctgtgggggaaacaacattggaagtaaaaatgtgcactggtaccagcagaagccaggccaggcccctgtgctggtcatctatagggatagcaaccggccctctgggatccctgagcgattctctggctccaactcggggaacacggccaccctgaccatcagcagagcccaagccggggatgaggctgactattactgtcaggtgtgggacagcagcacccatgtggtattcggcggagggaccaagctgaccntcctag

SEQ ID NO: 1029 - protein, 107 aa, Artificial Sequence
  Description of Artificial Sequence: Synthetic polypeptide
  MOD_RES (106)..(106): Any amino acid
SYELTQPLSVSVALGQTARITCGGNNIGSKNVHWYQQKPGQAPVLVIYRDSNRPSGIPERFSGSNSGNTATLTISRAQAGDEADYYCQVWDSSTHVVFGGGTKLTXL

SEQ ID NO: 1030 - protein, 10 aa, Artificial Sequence
  Description of Artificial Sequence: Synthetic peptide
QVWDSSTHVV

SEQ ID NO: 1031 - DNA, 359 bp, Artificial Sequence
  Description of Artificial Sequence: Synthetic polynucleotide
caggtgcagctggtggagtctgggggaggcgtggtccagcctgggaggtccctgagactctcctgtgcagcctctggattcaccttcattagctatggcatgcactgggtccgccaggctccaggcaagggactggagtgggtggcacttatctcatatgatggagctgataaattctatgcagactccgtgaagggccgattcaccatctccagagacaattccaagaacacgctgtatctgcaaatgaacagcttgagacctgaggacacggctgtttattactgtgcgaagggactagggtcccgaggcggagtaacggcgtactggggccagggaaccctggtcaccgtctcctc

SEQ ID NO: 1032 - protein, 119 aa, Artificial Sequence
  Description of Artificial Sequence: Synthetic polypeptide
QVQLVESGGGVVQPGRSLRLSCAASGFTFISYGMHWVRQAPGKGLEWVALISYDGADKFYADSVKGRFTISRDNSKNTLYLQMNSLRPEDTAVYYCAKGLGSRGGVTAYWGQGTLVTVS

SEQ ID NO: 1033 - protein, 13 aa, Artificial Sequence
  Description of Artificial Sequence: Synthetic peptide
AKGLGSRGGVTAY

SEQ ID NO: 1034 - DNA, 334 bp, Artificial Sequence
  Description of Artificial Sequence: Synthetic polynucleotide
cagtctgtgctgactcagtcatcctctgcctctgcttccctgggatcctcggtcaagctcacctgcactctgaacagtgggcacagtaggtacatcatcgcatggcatcagcagcagccagggaaggcccctcggtacttgatgaagcttgaacctagtggaagttacaacaaggggggcggaattcctgatcgcttctcaggctccagctctggggctgaccgctacctcaccgtctccaacctccagtctgaggatgaggctgattattactgtgagacctgggacagtcacactcgagttttcggcggagggaccaagctgaccgtcctag

SEQ ID NO: 1035 - protein, 111 aa, Artificial Sequence
  Description of Artificial Sequence: Synthetic polypeptide
QSVLTQSSSASASLGSSVKLTCTLNSGHSRYIIAWHQQQPGKAPRYLMKLEPSGSYNKGGGIPDRFSGSSSGADRYLTVSNLQSEDEADYYCETWDSHTRVFGGGTKLTVL

SEQ ID NO: 1036 - protein, 9 aa, Artificial Sequence
  Description of Artificial Sequence: Synthetic peptide
ETWDSHTRV

SEQ ID NO: 1037 - DNA, 348 bp, Artificial Sequence
  Description of Artificial Sequence: Synthetic polynucleotide
caggtgcagctggtggagtctgggggaggcgtggtccagcctgggaggtccctgagactctcctgtgcagcctctggacttaccttcagtcattatggcttccactgggtccgccaggctcctggcaaggggctgcagtgggtgtcatttatatcatatgatggaacatataaagactacacagactccgtgaagggccgactcaccatctccagagacaatttcaagaacactctgtttctgcaaatgaacagcctgacaagtgaagacacggctgtgtattattgtgtgcgatcgggccacggtctggacgtctggggccaagggaccacggtcatcgtctcctca

SEQ ID NO: 1038 - protein, 116 aa, Artificial Sequence
  Description of Artificial Sequence: Synthetic polypeptide
QVQLVESGGGVVQPGRSLRLSCAASGLTFSHYGFHWVRQAPGKGLQWVSFISYDGTYKDYTDSVKGRLTISRDNFKNTLFLQMNSLTSEDTAVYYCVRSGHGLDVWGQGTTVIVSS

SEQ ID NO: 1039 - protein, 9 aa, Artificial Sequence
  Description of Artificial Sequence: Synthetic peptide
VRSGHGLDV

SEQ ID NO: 1040 - DNA, 331 bp, Artificial Sequence
  Description of Artificial Sequence: Synthetic polynucleotide
  modified_base (65)..(66): a, c, t, g, unknown or other
  modified_base (87)..(87): a, c, t, g, unknown or other
  modified_base (120)..(120): a, c, t, g, unknown or other
  modified_base (140)..(140): a, c, t, g, unknown or other
  modified_base (170)..(173): a, c, t, g, unknown or other
cagtctgtgctgactcagcctgcctccgtgtctgggtctcctggacagtcgatcaccctatcatnncatggaaccagcagtgaggcnggtagtagtaagaatcagcctgcgtatcaacangggtctcgcgggcaccccancatcatctcttacaatggcaccagcagtgnnnnaggaatttcttctcgcttctctgcctccaagtctggaaacacggcctccctgaccatctctgggctccaggctgaggacgaggctaattattattgcagttcatatacagccaccaacacccctgttttcggcggagggaccaagctgaccgtcctag

SEQ ID NO: 1041 - protein, 110 aa, Artificial Sequence
  Description of Artificial Sequence: Synthetic polypeptide
  MOD_RES (22)..(22): Any amino acid
  MOD_RES (40)..(40): Any amino acid
  MOD_RES (47)..(47): Any amino acid
  MOD_RES (57)..(58): Any amino acid
QSVLTQPASVSGSPGQSITLSXHGTSSEAGSSKNQPAYQXGSRGHPXIISYNGTSSXXGISSRFSASKSGNTASLTISGLQAEDEANYYCSSYTATNTPVFGGGTKLTVL

SEQ ID NO: 1042 - protein, 10 aa, Artificial Sequence
  Description of Artificial Sequence: Synthetic peptide
SSYTATNTPV

SEQ ID NO: 1043 - DNA, 352 bp, Artificial Sequence
  Description of Artificial Sequence: Synthetic polynucleotide
gaggtgcagctggtggagtctggggaaggcttggtccagccgggggggtcccagagactctcctgtgcagcctctggattcaccttcagtggctaccatatgtactgggtccgccaggctccaggtaagggactagaatatgtttcaggtatcaccagtgatggaagtgtcacatattatgcagactctgtgagggacagattcacgatctccagagacaactccaagaacacgctgtatcttcaaatgggcagcctgagacctgaggacatggctgtgtattactgtgcgagaggccgtgggagctactgtgacttctggggccagggaaccctggtcaccgtcccctcag

SEQ ID NO: 1044 - protein, 117 aa, Artificial Sequence
  Description of Artificial Sequence: Synthetic polypeptide
EVQLVESGEGLVQPGGSQRLSCAASGFTFSGYHMYWVRQAPGKGLEYVSGITSDGSVTYYADSVRDRFTISRDNSKNTLYLQMGSLRPEDMAVYYCARGRGSYCDFWGQGTLVTVPS

SEQ ID NO: 1045 - protein, 10 aa, Artificial Sequence
  Description of Artificial Sequence: Synthetic peptide
ARGRGSYCDF

SEQ ID NO: 1046 - DNA, 334 bp, Artificial Sequence
  Description of Artificial Sequence: Synthetic polynucleotide
cagtctgtgctgactcagcctgcctccgtgtctgggtctcctggacagtcgatcaccatctcctgcactggaaccagcagtgacgttggtgcttataactatgtctcctggtaccagcagcacccaggcaaaccccccaaactcatgatttatgaggtcattaatcgggcctctggggtttctaatcgcttctctggctccaagtctggcaacacggcctccttgaccatctctgggctccaggctgaggacgaggctgattattactgcacctcatatacaagcagcatcactctcgacgtcttcggaactgggaccaaggtcaccgtcctag

SEQ ID NO: 1047 - protein, 111 aa, Artificial Sequence
  Description of Artificial Sequence: Synthetic polypeptide
QSVLTQPASVSGSPGQSITISCTGTSSDVGAYNYVSWYQQHPGKPPKLMIYEVINRASGVSNRFSGSKSGNTASLTISGLQAEDEADYYCTSYTSSITLDVFGTGTKVTVL

SEQ ID NO: 1048 - protein, 11 aa, Artificial Sequence
  Description of Artificial Sequence: Synthetic peptide
TSYTSSITLDV

SEQ ID NO: 1049 - DNA, 364 bp, Artificial Sequence
  Description of Artificial Sequence: Synthetic polynucleotide
gaggtgcagctggtggagtctgggggaggtgtggtacggccgggggggtccctgagactctcctgtgcagtctctggattcatctttgatgattttggcatgagctgggtccgccaagctccagggaaggggctggagtggctcgctggtactagttggaatggcggtggcacatattatgcagactctgtgaagggccgattcaccatctccagagacaacgccaagaactccctgtatctgcaaatgaacagtctgagagtcgaggacacggccttctatcactgtgcgagagatataaagggcagtggctggtactggttcgacccgtggggccagggaaccctggtcaccgtctcctcag

SEQ ID NO: 1050 - protein, 121 aa, Artificial Sequence
  Description of Artificial Sequence: Synthetic polypeptide
EVQLVESGGGVVRPGGSLRLSCAVSGFIFDDFGMSWVRQAPGKGLEWLAGTSWNGGGTYYADSVKGRFTISRDNAKNSLYLQMNSLRVEDTAFYHCARDIKGSGWYWFDPWGQGTLVTVSS

SEQ ID NO: 1051 - protein, 14 aa, Artificial Sequence
  Description of Artificial Sequence: Synthetic peptide
ARDIKGSGWYWFDP

SEQ ID NO: 1052 - DNA, 334 bp, Artificial Sequence
  Description of Artificial Sequence: Synthetic polynucleotide
aattttatgctgactcagccgcactctctgtcggagtctccggggaagtcggtaaccatctcctgcacccgcagcagtggcagcatttccggcaactttgtgcagtggtaccaacagcgcccgggcagagcccccaccactgtgatctttgaatttaaccaaagagcctctggggtccctgaccggttctctggctccatcgacagctcctccaattctgcctccctcaccatctctggactgaagactgacgacgaggctgactactattgtcagtcttataataggaacaatcaggcggttttcggcggggggaccaagctgaccgtcctag

SEQ ID NO: 1053 - protein, 111 aa, Artificial Sequence
  Description of Artificial Sequence: Synthetic polypeptide
NFMLTQPHSLSESPGKSVTISCTRSSGSISGNFVQWYQQRPGRAPTTVIFEFNQRASGVPDRFSGSIDSSSNSASLTISGLKTDDEADYYCQSYNRNNQAVFGGGTKLTVL

SEQ ID NO: 1054 - protein, 10 aa, Artificial Sequence
  Description of Artificial Sequence: Synthetic peptide
QSYNRNNQAV

SEQ ID NO: 1055 - DNA, 346 bp, Artificial Sequence
  Description of Artificial Sequence: Synthetic polynucleotide
caggtgcagctggtgcagtctggggctgaggtgaagaagccaggggcctcagtgaaggtctcctgtaagacttcaggatacaccttcataaattatgatatcaactgggtgcgacaggcccctggacaagggcttgagtggatgggatggatgagccctaatagtggctacacaggctatgcacagaagttccagggcagggtcaccatgaccagggacacctccacaggaacagcctacatggagttgaataatttaagatctgaagacacggctgtctattactgtgcgagatcgtggtggttcgacgtctggggcctgggaacccgggtcatcgtctcctcag

SEQ ID NO: 1056 - protein, 115 aa, Artificial Sequence
  Description of Artificial Sequence: Synthetic polypeptide
QVQLVQSGAEVKKPGASVKVSCKTSGYTFINYDINWVRQAPGQGLEWMGWMSPNSGYTGYAQKFQGRVTMTRDTSTGTAYMELNNLRSEDTAVYYCARSWWFDVWGLGTRVIVSS

SEQ ID NO: 1057 - protein, 8 aa, Artificial Sequence
  Description of Artificial Sequence: Synthetic peptide
ARSWWFDV

SEQ ID NO: 1058 - DNA, 326 bp, Artificial Sequence
  Description of Artificial Sequence: Synthetic polynucleotide
cagtctgtgctgactcagtcgccctctgcctctgcctccctgggagcctcggtcaagctcacctgcattctgagcagtgggcacaacaactacgccatcgcatggcatcagcagcagccagagaagggccctcggttcttgatgaaggtcaacagtgatggcagccacaacaagggggacgggatccctgatcgcttctcaggctccagctctggggctgagcgctacctcaccatttccagcctccagtctgaggatgaggctgtctattactgtcagacctggggcccttgggtcctcggcggagggaccaagctgaccgtcct

SEQ ID NO: 1059 - protein, 108 aa, Artificial Sequence
  Description of Artificial Sequence: Synthetic polypeptide
QSVLTQSPSASASLGASVKLTCILSSGHNNYAIAWHQQQPEKGPRFLMKVNSDGSHNKGDGIPDRFSGSSSGAERYLTISSLQSEDEAVYYCQTWGPWVLGGGTKLTV

SEQ ID NO: 1060 - protein, 7 aa, Artificial Sequence
  Description of Artificial Sequence: Synthetic peptide
QTWGPWV

SEQ ID NO: 1061 - DNA, 396 bp, Artificial Sequence
  Description of Artificial Sequence: Synthetic polynucleotide
caggtgcagctggtggagtctgggggaggcgtggtccagcctggaaggtccctgagactctcctgtgcagcctctggattcaccttcagcagctttggcatgcactgggtccgccaggctccaggcaaggggctggagtgggtgggagttatttcatatgatggaaataataaatattatgcagactccgtgaagggccgattcaccatctccagagacaattccaggaacacgttgtatctgcaaatgagtagcctgagaaatgaggacacggctgcatattactgtgcgaaggattccttgcgttacgacttttggagtggtgatcaatgggcttactaccacttctaccatatggacgtctggggccaagggaccacggtcaccgtctcctca

SEQ ID NO: 1062 - protein, 132 aa, Artificial Sequence
  Description of Artificial Sequence: Synthetic polypeptide
QVQLVESGGGVVQPGRSLRLSCAASGFTFSSFGMHWVRQAPGKGLEWVGVISYDGNNKYYADSVKGRFTISRDNSRNTLYLQMSSLRNEDTAAYYCAKDSLRYDFWSGDQWAYYHFYHMDVWGQGTTVTVSS

SEQ ID NO: 1063 - protein, 25 aa, Artificial Sequence
  Description of Artificial Sequence: Synthetic peptide
AKDSLRYDFWSGDQWAYYHFYHMDV

SEQ ID NO: 1064 - DNA, 331 bp, Artificial Sequence
  Description of Artificial Sequence: Synthetic polynucleotide
cagtctgtgctgactcagccgccctcagtgtctgcggccccaggacagaaggtcaccatctcctgctctggaagcacctccactcttggaaatgattatatatcctggtaccagcagctcccaggaacagcccccaaactcctcatctatgaaaatgataagcgaccctcagggattcctgaccgattctctggctccaagtctggcacgtcagccgccctgggcatcaccggactccagactggggacgaggccgattattactgcggaacgtgggatagtggcctcagacttatggtattcggcggagggaccaagctgaccgtcctag

SEQ ID NO: 1065 - protein, 110 aa, Artificial Sequence
  Description of Artificial Sequence: Synthetic polypeptide
QSVLTQPPSVSAAPGQKVTISCSGSTSTLGNDYISWYQQLPGTAPKLLIYENDKRPSGIPDRFSGSKSGTSAALGITGLQTGDEADYYCGTWDSGLRLMVFGGGTKLTVL

SEQ ID NO: 1066 - protein, 11 aa, Artificial Sequence
  Description of Artificial Sequence: Synthetic peptide
GTWDSGLRLMV

SEQ ID NO: 1067 - DNA, 364 bp, Artificial Sequence
  Description of Artificial Sequence: Synthetic polynucleotide
caggtgcagctggtgcagtctggggctgaggtgaagaggcctggggcctcagtgaaggtctcctgcaagacttctggatacaccttcaccggctactatatacactgggtgcgacaggcccctggacaagggcttgagtggatgggatggatcaacccaaacagtggtgacgcaaactatgcacagaagtttcaaggctgggtcaccatgaccagggacacgtccatcagcacagcctacctggagctgagcaggctgagatttgccgacacggccatgtattactgtgcgacttactatggttcggggaggtctgatgcttttgatatctggggccaagggacaacggtcatcgtctcttcag

SEQ ID NO: 1068 - protein, 121 aa, Artificial Sequence
  Description of Artificial Sequence: Synthetic polypeptide
QVQLVQSGAEVKRPGASVKVSCKTSGYTFTGYYIHWVRQAPGQGLEWMGWINPNSGDANYAQKFQGWVTMTRDTSISTAYLELSRLRFADTAMYYCATYYGSGRSDAFDIWGQGTTVIVSS

SEQ ID NO: 1069 - protein, 14 aa, Artificial Sequence
  Description of Artificial Sequence: Synthetic peptide
ATYYGSGRSDAFDI

SEQ ID NO: 1070 - DNA, 331 bp, Artificial Sequence
  Description of Artificial Sequence: Synthetic polynucleotide
cagtctgtgctgactcagcctgcctccgtgtctgggtctcctggacagtcgatcaccatctcctgcactggaaccagcagtgatgttgggagttataaccttgtctcctggtaccaacaacacccaggcaaagcccccaaactcatgatttatgaggtcactaagcggccctcagggatttctattcgcttctctggctccaagtctggcaacacggcctccctgacaatctctgggctccaggctgaggacgaggctgattatcactgctgctcatttgcaggtcgcaccacttgggtgttcggcggagggaccaaactgaccgtcctag

SEQ ID NO: 1071 - protein, 110 aa, Artificial Sequence
  Description of Artificial Sequence: Synthetic polypeptide
QSVLTQPASVSGSPGQSITISCTGTSSDVGSYNLVSWYQQHPGKAPKLMIYEVTKRPSGISIRFSGSKSGNTASLTISGLQAEDEADYHCCSFAGRTTWVFGGGTKLTVL

SEQ ID NO: 1072 - protein, 10 aa, Artificial Sequence
  Description of Artificial Sequence: Synthetic peptide
CSFAGRTTWV

SEQ ID NO: 1073 - DNA, 349 bp, Artificial Sequence
  Description of Artificial Sequence: Synthetic polynucleotide
caggtgcagctggtggagtctgggggaggcgtggtccagcctgggaggtccctgagactctcctgtgcagcctctggattcaccttcagtcactatcctatgcactgggtccgccaggctccaggcaaggggctggagtggctggcacttatttcatatgatggaggcagtaaatactacgcagactccgtgacgggccgattcaccatctccagagaccagtccaagaacacactttatatagaaatgaacagcctgacacgtgaggacacggctgtctattactgtgcgagaggcgtgtggggccttgactactggggccagggaaccctggtcaccgtctcctcag

SEQ ID NO: 1074 - protein, 116 aa, Artificial Sequence
  Description of Artificial Sequence: Synthetic polypeptide
QVQLVESGGGVVQPGRSLRLSCAASGFTFSHYPMHWVRQAPGKGLEWLALISYDGGSKYYADSVTGRFTISRDQSKNTLYIEMNSLTREDTAVYYCARGVWGLDYWGQGTLVTVSS

SEQ ID NO: 1075 - protein, 9 aa, Artificial Sequence
  Description of Artificial Sequence: Synthetic peptide
ARGVWGLDY

SEQ ID NO: 1076 - DNA, 328 bp, Artificial Sequence
  Description of Artificial Sequence: Synthetic polynucleotide
cagtctgtgctgactcagcctcgctcagtgtccgggtctcctggacagtcagtcaccatctcctgcactggaaccagcagtgatgttggtggttatgactatgtctcctggtttcaacaatattcaggcaaagcccccaaactcatgatttatgatgtcactaagcggccctcaggggtccctgatcgcttctctggctccaagtctggcaacacggcctccctgaccatctctgggctccaggctgaggatgaggctgattattactgctgctcatatggaggcaacttttatgtcttcggagctgggaccaaggtcaccgtcctag

SEQ ID NO: 1077 - protein, 109 aa, Artificial Sequence
  Description of Artificial Sequence: Synthetic polypeptide
QSVLTQPRSVSGSPGQSVTISCTGTSSDVGGYDYVSWFQQYSGKAPKLMIYDVTKRPSGVPDRFSGSKSGNTASLTISGLQAEDEADYYCCSYGGNFYVFGAGTKVTVL

SEQ ID NO: 1078 - protein, 9 aa, Artificial Sequence
  Description of Artificial Sequence: Synthetic peptide
CSYGGNFYV

SEQ ID NO: 1079 - DNA, 347 bp, Artificial Sequence
  Description of Artificial Sequence: Synthetic polynucleotide
caggtgcagctggtggagtctgggggaggcgtggtcctgcctgggaagtccctgagactctcctgtgcagcctctgcattcaccttcagtcactatgtcatgcactgggtccgccaggctccagggaaggggctggagtgggtggcacttatatcatatgatggaagtggtaaatactacgcagactccgtgaagggccgattcaccatctccagagacaatgccaagaacacgctgtatctgcaaataaacagcctgagacctgaggacacggctgtttattactgtacaagagggggcttcggcctcgactactggggccagggaaccctggtcaccgtctcctc

SEQ ID NO: 1080 - protein, 115 aa, Artificial Sequence
  Description of Artificial Sequence: Synthetic polypeptide
QVQLVESGGGVVLPGKSLRLSCAASAFTFSHYVMHWVRQAPGKGLEWVALISYDGSGKYYADSVKGRFTISRDNAKNTLYLQINSLRPEDTAVYYCTRGGFGLDYWGQGTLVTVS

SEQ ID NO: 1081 - protein, 9 aa, Artificial Sequence
  Description of Artificial Sequence: Synthetic peptide
TRGGFGLDY

SEQ ID NO: 1082 - DNA, 329 bp, Artificial Sequence
  Description of Artificial Sequence: Synthetic polynucleotide
cagtctgccctgactcagcctgcctccgtgtctgggtctcctggacagtcgatcaccatctcctgttctggaagcagcagtgacattggtggttataatactgtctcctggtaccaacaacacccaaacgaagcccccgcactcctgatttatgaagtcaatcatcggccctcaggggtttctactcgtttctctggctccaagtctcacaacacggcctccctgaccatctctgggctccaggctgaggacgaggctgattattactgctactcatatacaagcagcagcacttgggtgttcggcggggggaccaaggtgaccgtcct

SEQ ID NO: 1083 - protein, 109 aa, Artificial Sequence
  Description of Artificial Sequence: Synthetic polypeptide
QSALTQPASVSGSPGQSITISCSGSSSDIGGYNTVSWYQQHPNEAPALLIYEVNHRPSGVSTRFSGSKSHNTASLTISGLQAEDEADYYCYSYTSSSTWVFGGGTKVTV

SEQ ID NO: 1084 - protein, 10 aa, Artificial Sequence
  Description of Artificial Sequence: Synthetic peptide
YSYTSSSTWV

SEQ ID NO: 1085 - DNA, 352 bp, Artificial Sequence
  Description of Artificial Sequence: Synthetic polynucleotide
caggtgcagctgcaggagtcgggcccaggactggtgaagccttcacagaccctgtccctcacctgcactgtctctggtggctccatcagcagtggtggttactactggagctggttccgccagcacccagggaagggcctggagtggattgggttcatctattacaatgggagaacctactacaacccgtccctcaagagtcgacttaccatatcagtagacacgtctaagaaccagttctccctgaggctgagctctgtgactgccgcggacacggccgtttattactgtgcgagagatctaggacactttgactcctggggccagggaaccctggtcaccgtctcctcag

SEQ ID NO: 1086 - protein, 117 aa, Artificial Sequence
  Description of Artificial Sequence: Synthetic polypeptide
QVQLQESGPGLVKPSQTLSLTCTVSGGSISSGGYYWSWFRQHPGKGLEWIGFIYYNGRTYYNPSLKSRLTISVDTSKNQFSLRLSSVTAADTAVYYCARDLGHFDSWGQGTLVTVSS

SEQ ID NO: 1087 - protein, 9 aa, Artificial Sequence
  Description of Artificial Sequence: Synthetic peptide
ARDLGHFDS

SEQ ID NO: 1088 - DNA, 331 bp, Artificial Sequence
  Description of Artificial Sequence: Synthetic polynucleotide
cagtctgtgctgactcagcctgcctccgtgtctgggtctcctggacagtcgatcatcatctcctgcactggaaccagcagtgacgttggtttttataactatgtctcctggtaccaacaacacccaggcaaagcccccaaactcatgatttatgaggtcagtaatcggccctcagggatttctactcgcttctctggctccaagtctggcaacacggccttcctgaccatctctgggctccaggctgaggacgaggctgattattactgcagctcatatataagcggcggcactcgggtgttcggcggagggaccaagctgaccgtcctag

SEQ ID NO: 1089 - protein, 110 aa, Artificial Sequence
  Description of Artificial Sequence: Synthetic polypeptide
QSVLTQPASVSGSPGQSIIISCTGTSSDVGFYNYVSWYQQHPGKAPKLMIYEVSNRPSGISTRFSGSKSGNTAFLTISGLQAEDEADYYCSSYISGGTRVFGGGTKLTVL

SEQ ID NO: 1090 - protein, 10 aa, Artificial Sequence
  Description of Artificial Sequence: Synthetic peptide
SSYISGGTRV

SEQ ID NO: 1091 - DNA, 352 bp, Artificial Sequence
  Description of Artificial Sequence: Synthetic polynucleotide
caggtgcagctggtgcagtctggggctgaggtgaagaagcctggggcctcagtgaaggtctcctgcaaggcttctggatacaccttcaccggccactatatgcactgggtgcgacaggtccctggacaagggcttgagtggatgggatggatcaaccctaatagaggcacaaactatgcacagaagtttgagggcagggtcaccatgaccagggacacgtccatcagcacattttacatggaactgagcagactgagatctgacgactcggccgtgtatttctgtgcgagagataacagtgggagctacaatgactactggggccagggaaccctggtcaccgtctcctcag

SEQ ID NO: 1092 - protein, 117 aa, Artificial Sequence
  Description of Artificial Sequence: Synthetic polypeptide
QVQLVQSGAEVKKPGASVKVSCKASGYTFTGHYMHWVRQVPGQGLEWMGWINPNRGTNYAQKFEGRVTMTRDTSISTFYMELSRLRSDDSAVYFCARDNSGSYNDYWGQGTLVTVSS

SEQ ID NO: 1093 - protein, 11 aa, Artificial Sequence
  Description of Artificial Sequence: Synthetic peptide
ARDNSGSYNDY

SEQ ID NO: 1094 - DNA, 331 bp, Artificial Sequence
  Description of Artificial Sequence: Synthetic polynucleotide
cagtctgtgctgactcagcctgcctccctgtctgggtctcctggacagtcgatcaccatctcctgcactggaaccagcagtgatgttggaaattataaccttgtctcctggtaccaacaccacccaggcaaagcccccaaactcctgatttatgaggtcaataagcggccgtcaggggtttctaatcgcttctctggctccaagtctggcaacacggcctccctgacaatctctgggctccaggctgaggacgaggctgattattactgctgctcatatgcaagtagtggcactcgggtgttcggcggagggaccaaggtgaccgtcctag

SEQ ID NO: 1095 - protein, 110 aa, Artificial Sequence
  Description of Artificial Sequence: Synthetic polypeptide
QSVLTQPASLSGSPGQSITISCTGTSSDVGNYNLVSWYQHHPGKAPKLLIYEVNKRPSGVSNRFSGSKSGNTASLTISGLQAEDEADYYCCSYASSGTRVFGGGTKVTVL

SEQ ID NO: 1096 - protein, 10 aa, Artificial Sequence
  Description of Artificial Sequence: Synthetic peptide
CSYASSGTRV

SEQ ID NO: 1097 - DNA, 348 bp, Artificial Sequence
  Description of Artificial Sequence: Synthetic polynucleotide
caggtgcagctggtggagtctgggggaggcgtggtccagcctgggaggtccctgagactctcctgtgcagcgtctggattcaccttcagtcactatggcattcactgggtccgccaggctccaggcaaggggctggaatgggtggcacttatcttatatgatggaagtaataaatactatgcagactccgtgaagggccgattcaccatctccagagacaattccaagaacaccctgtatctgcaaatgaacagcctgagcgccgaggacacggctgtctattactgtgcgagagacggtttcggtatggacgtctggggccaagggaccacggtcaccgtctcctca

SEQ ID NO: 1098 - protein, 116 aa, Artificial Sequence
  Description of Artificial Sequence: Synthetic polypeptide
QVQLVESGGGVVQPGRSLRLSCAASGFTFSHYGIHWVRQAPGKGLEWVALILYDGSNKYYADSVKGRFTISRDNSKNTLYLQMNSLSAEDTAVYYCARDGFGMDVWGQGTTVTVSS

SEQ ID NO: 1099 - protein, 9 aa, Artificial Sequence
  Description of Artificial Sequence: Synthetic peptide
ARDGFGMDV

SEQ ID NO: 1100 - DNA, 328 bp, Artificial Sequence
  Description of Artificial Sequence: Synthetic polynucleotide
cagtctgtgctgactcagcctcgctcagtgtccgggtctcctggacagtcagtcaccatctcctgcactggaaccagcagtgatgttggtgcttataactatgtctcctggttccaacaatacccaggcaaagccccccaactcatgatttatgatgtcgataagcggccctcaggggtccctgatcgcttctctggctccaagtctggcaacacggcctccctgaccatctctggcctccagtctgaggatgaggctgattattactgttcttcatatgcaggcggcccacgggtcttcgggactgggaccaaggtcaccgtcctag

SEQ ID NO: 1101 - protein, 109 aa, Artificial Sequence
  Description of Artificial Sequence: Synthetic polypeptide
QSVLTQPRSVSGSPGQSVTISCTGTSSDVGAYNYVSWFQQYPGKAPQLMIYDVDKRPSGVPDRFSGSKSGNTASLTISGLQSEDEADYYCSSYAGGPRVFGTGTKVTVL

SEQ ID NO: 1102 - protein, 9 aa, Artificial Sequence
  Description of Artificial Sequence: Synthetic peptide
SSYAGGPRV

SEQ ID NO: 1103 - DNA, 361 bp, Artificial Sequence
  Description of Artificial Sequence: Synthetic polynucleotide
caggtgcagctggtggagtctgggggaggcgtggtccagcctgggaggtccctgagactctcctgtgaagcctctgggttcaccttcattagctatggcatgcactgggtccgccaggctccaggcaaggggctggagtgggtggcaggtatatggtatgatggaagtaataaatactatgcagactccgtgaagggccgattcaccatctccagagacaattccaagaacacacagtatctacaaatgaacagcctgagagccgaggacacggctgtgtattactgtacgagagtcggtggtaactctctaggttctgttgactactggggccagggaaccctggtcaccgtctcctcag

SEQ ID NO: 1104 - protein, 120 aa, Artificial Sequence
  Description of Artificial Sequence: Synthetic polypeptide
QVQLVESGGGVVQPGRSLRLSCEASGFTFISYGMHWVRQAPGKGLEWVAGIWYDGSNKYYADSVKGRFTISRDNSKNTQYLQMNSLRAEDTAVYYCTRVGGNSLGSVDYWGQGTLVTVSS

SEQ ID NO: 1105 - protein, 13 aa, Artificial Sequence
  Description of Artificial Sequence: Synthetic peptide
TRVGGNSLGSVDY

SEQ ID NO: 1106 - DNA, 337 bp, Artificial Sequence
  Description of Artificial Sequence: Synthetic polynucleotide
cagtctgtgctgactcagtcgccctctgcctctgcctccctgggagcctcggtcaagctcacctgcactctgagcggcgggcacaacaactacgtcatcgcttggcatcagcagcaaccagagaagggccctcgttacttgatgaaggttaacagtgatggcagccacagcaagggggacgggatccctgctcgcttctcaggctccagctctggggctgagcgctacctcaccatctccagcctccagtctgaggatgaggctgactattactgtcagacctggggcactggcattcatgtggtattcggcggagggaccaagctgaccgtcctag

SEQ ID NO: 1107 - protein, 112 aa, Artificial Sequence
  Description of Artificial Sequence: Synthetic polypeptide
QSVLTQSPSASASLGASVKLTCTLSGGHNNYVIAWHQQQPEKGPRYLMKVNSDGSHSKGDGIPARFSGSSSGAERYLTISSLQSEDEADYYCQTWGTGIHVVFGGGTKLTVL

SEQ ID NO: 1108 - protein, 10 aa, Artificial Sequence
  Description of Artificial Sequence: Synthetic peptide
QTWGTGIHVV

SEQ ID NO: 1109 - DNA, 352 bp, Artificial Sequence
  Description of Artificial Sequence: Synthetic polynucleotide
caggtgcagctggtggagtctgggggaggcgtggtccagcctgggaggtccctaagactctcctgtgcagcctctggattcaccttcagtcactatggcatgcactgggtccgccaggctccaggcaaggggctgcagtggatggctatgatctcatatgatggaggttataaatactatgcagactccgtgaagggccgattcaccatctccagagacgattccaagaacacactgtctctgcaaatgggcagcctgagaagtgaggacacggctgtgtattactgtgcgagaggctgggctggcctgttcgactactggggccagggaatcctggtcagcgtctcctcag

SEQ ID NO: 1110 - protein, 117 aa, Artificial Sequence
  Description of Artificial Sequence: Synthetic polypeptide
QVQLVESGGGVVQPGRSLRLSCAASGFTFSHYGMHWVRQAPGKGLQWMAMISYDGGYKYYADSVKGRFTISRDDSKNTLSLQMGSLRSEDTAVYYCARGWAGLFDYWGQGILVSVSS

SEQ ID NO: 1111 - protein, 10 aa, Artificial Sequence
  Description of Artificial Sequence: Synthetic peptide
ARGWAGLFDY

SEQ ID NO: 1112 - DNA, 328 bp, Artificial Sequence
  Description of Artificial Sequence: Synthetic polynucleotide
cagtctgtgctgactcagcctcgctcagtgtccgggtctcctggacagtcagtcaccatctcctgcactggaaccagcagtgatgttggtggttataattatgtctcctggtaccaacaacacccaggcaaagcccccaaagtcttgatttatgatgtcaatgagcggccctcaggggtccctgatcgcttctctggctccaagtctggcaacacggcctccctgaccatctctgggctccaggctgaggatgaggctgaatattactgctgctcatttacaggcacatcttatgtcttcggaactgggacccaggtcaccgtcctag

SEQ ID NO: 1113 - protein, 109 aa, Artificial Sequence
  Description of Artificial Sequence: Synthetic polypeptide
QSVLTQPRSVSGSPGQSVTISCTGTSSDVGGYNYVSWYQQHPGKAPKVLIYDVNERPSGVPDRFSGSKSGNTASLTISGLQAEDEAEYYCCSFTGTSYVFGTGTQVTVL

SEQ ID NO: 1114 - protein, 9 aa, Artificial Sequence
  Description of Artificial Sequence: Synthetic peptide
CSFTGTSYV

SEQ ID NO: 1115 - DNA, 370 bp, Artificial Sequence
  Description of Artificial Sequence: Synthetic polynucleotide
caggtccagcttgtgcagtctggggctgaggtgaagaagcctggggcctcggtgagggtttcctgcaaggcttctggatatagtttcactaattatgctatgcattgggtgcgccaggcccccggacaaaggcctgagtggatgggatggatcaacgctggcaacggtcaaacaaagttttcacagaagttccagggcagagtctccatttccagggacacgtccgcgagtacagcatatatggaattgcgcagtctgagatctgatgacacggctgtgtattactgtgcgagagatgtcggccacgttatggcgcagagggatgcttttggtatgtggggccaagggacaatgatcatcgtctcttcag

SEQ ID NO: 1116 - protein, 123 aa, Artificial Sequence
  Description of Artificial Sequence: Synthetic polypeptide
QVQLVQSGAEVKKPGASVRVSCKASGYSFTNYAMHWVRQAPGQRPEWMGWINAGNGQTKFSQKFQGRVSISRDTSASTAYMELRSLRSDDTAVYYCARDVGHVMAQRDAFGMWGQGTMIIVSS

SEQ ID NO: 1117 - protein, 16 aa, Artificial Sequence
  Description of Artificial Sequence: Synthetic peptide
ARDVGHVMAQRDAFGM

SEQ ID NO: 1118 - DNA, 334 bp, Artificial Sequence
  Description of Artificial Sequence: Synthetic polynucleotide
cagtctgtgctgactcagccgccctcagtgtctggggccccagggcagagggtcaccatctcctgcactgggagcagctccaacatcggggcaggttatgatgtacactggtaccagcagcttccaggaacagcccccaaactcctcatctatggtaacagcaatcggccctcaggggtccctgaccgattctctggctccaagtctggcacctcagcctccctggccatcactgggctccaggctgaggatgaggctgattattactgccagtcctatgacagcagcctgagtggttatgtcttcggaactgggaccaaggtcaccgtcctag

SEQ ID NO: 1119 - protein, 111 aa, Artificial Sequence
  Description of Artificial Sequence: Synthetic polypeptide
QSVLTQPPSVSGAPGQRVTISCTGSSSNIGAGYDVHWYQQLPGTAPKLLIYGNSNRPSGVPDRFSGSKSGTSASLAITGLQAEDEADYYCQSYDSSLSGYVFGTGTKVTVL

SEQ ID NO: 1120 - protein, 11 aa, Artificial Sequence
  Description of Artificial Sequence: Synthetic peptide
QSYDSSLSGYV

SEQ ID NO: 1121 - DNA, 373 bp, Artificial Sequence
  Description of Artificial Sequence: Synthetic polynucleotide
caggtgcagctgcaggagtcgggcccaggactggtgaagccttcacagaccctatccctcacctgctccgtctctggtggctccctcagcggcggtgttcagtactggagttggatccgccagcacccagggaagggcctggagtggattggattcatctatgacagtggggctgtttactacaatccgtccctcaggagtcgattcaccatttcaatagacacgtctaagaatcagttctccctaaaggtgacctctgtggctgccgcggacacggccgtctattactgtgcgagggcccgcgcaattggtggctacgaagggtggcacttcgatctctggggccgcggcaccctggtcactgtctcgtcag

SEQ ID NO: 1122 - protein, 124 aa, Artificial Sequence
  Description of Artificial Sequence: Synthetic polypeptide
QVQLQESGPGLVKPSQTLSLTCSVSGGSLSGGVQYWSWIRQHPGKGLEWIGFIYDSGAVYYNPSLRSRFTISIDTSKNQFSLKVTSVAAADTAVYYCARARAIGGYEGWHFDLWGRGTLVTVSS

SEQ ID NO: 1123 - protein, 16 aa, Artificial Sequence
  Description of Artificial Sequence: Synthetic peptide
ARARAIGGYEGWHFDL

SEQ ID NO: 1124 - DNA, 336 bp, Artificial Sequence
  Description of Artificial Sequence: Synthetic polynucleotide
cagtctgtgctgactcagccgccctcagtgtctggggccccaggacagagggtcaccatctcctgcactgggaacagctccaacatcggggcagattatgatgtccattggtaccagcaacttccaggaacagcccccagactcctcatctatggtaacaccaatcggccctcaggggtccctgaccgattctctgcctccaggtctggcacctctgcctccctggccatcactgggctccaggctggagatgaggctgtctatcactgccagtcctatgacaaccgtctgagtggttcgagggtattcggcggagggaccaagctgaccgtccta

SEQ ID NO: 1125 - protein, 112 aa, Artificial Sequence
  Description of Artificial Sequence: Synthetic polypeptide
QSVLTQPPSVSGAPGQRVTISCTGNSSNIGADYDVHWYQQLPGTAPRLLIYGNTNRPSGVPDRFSASRSGTSASLAITGLQAGDEAVYHCQSYDNRLSGSRVFGGGTKLTVL

SEQ ID NO: 1126 - protein, 12 aa, Artificial Sequence
  Description of Artificial Sequence: Synthetic peptide
QSYDNRLSGSRV

SEQ ID NO: 1127 - DNA, 352 bp, Artificial Sequence
  Description of Artificial Sequence: Synthetic polynucleotide
caggtgcagctggtggagtctgggggaggcgtggtgcagcctgggaggtccctgagactctcctgtgcagcctctggattcaccttccctcactatgctatacactgggtccgccaggctccaggcaaggggctggactgggtgacatttatatcatatgatggaagcaataaatactactcagactccgtgaagggccgattcaccatctccagagacaattccaagaacacggtgtatctgcaaatgaacagcctgagaactgacgacacggctgtgtattattgtgcgagaggctacggtggcctctttgactattggggccagggaaccctggtcaccgtctcctcag

SEQ ID NO: 1128 - protein, 117 aa, Artificial Sequence
  Description of Artificial Sequence: Synthetic polypeptide
QVQLVESGGGVVQPGRSLRLSCAASGFTFPHYAIHWVRQAPGKGLDWVTFISYDGSNKYYSDSVKGRFTISRDNSKNTVYLQMNSLRTDDTAVYYCARGYGGLFDYWGQGTLVTVSS

SEQ ID NO: 1129 - protein, 10 aa, Artificial Sequence
  Description of Artificial Sequence: Synthetic peptide
ARGYGGLFDY

SEQ ID NO: 1130 - DNA, 331 bp, Artificial Sequence
  Description of Artificial Sequence: Synthetic polynucleotide
cagtctgtgctgactcagcctgcctccgtgtctgggtctcccggacagtcgatcaccatctcctgcactggaaccagcagtgacgttggtggttataagtttgtctcctggtaccaacagcactcaggcacagcccccaaagtcattatttatgatgtcagtgatcggccctcaggggtttcttatcggttctctgggtccaagtctggcaacacggcctccctgaccatctctgggctccaggctgaggacgaggcttattattactgcagctcatatacgaccagcagcgcttatgtcttcggaactgggaccaaggtcaccgtcctag

SEQ ID NO: 1131 - protein, 110 aa, Artificial Sequence
  Description of Artificial Sequence: Synthetic polypeptide
QSVLTQPASVSGSPGQSITISCTGTSSDVGGYKFVSWYQQHSGTAPKVIIYDVSDRPSGVSYRFSGSKSGNTASLTISGLQAEDEAYYYCSSYTTSSAYVFGTGTKVTVL

SEQ ID NO: 1132 - protein, 10 aa, Artificial Sequence
  Description of Artificial Sequence: Synthetic peptide
SSYTTSSAYV

SEQ ID NO: 1133 - DNA, 364 bp, Artificial Sequence
  Description of Artificial Sequence: Synthetic polynucleotide
caggtgcagctggtgcagtctggggctgaggtgaggaagcctggggcctcggtgcaggtctcctgcaaaccttctggatacatcttcaccggccactatatatattgggtgcggcaggcccctggacaagggcttgagtggatggggtggatcaaccctaacagtggtgacacaaactatgcacagaagtttcagggcagggtcagcatgaccagggacacgtccatcagtacagcctatatggagattatcagactgacgtcagacgacacggccgtctattactgtgcgaggtttctagcagcggctggcacgggtgcttttgatatctggggccaagggacaatggtcacagtctcttcag

SEQ ID NO: 1134 - protein, 121 aa, Artificial Sequence
  Description of Artificial Sequence: Synthetic polypeptide
QVQLVQSGAEVRKPGASVQVSCKPSGYIFTGHYIYWVRQAPGQGLEWMGWINPNSGDTNYAQKFQGRVSMTRDTSISTAYMEIIRLTSDDTAVYYCARFLAAAGTGAFDIWGQGTMVTVSS

SEQ ID NO: 1135 - protein, 14 aa, Artificial Sequence
  Description of Artificial Sequence: Synthetic peptide
ARFLAAAGTGAFDI

SEQ ID NO: 1136 - DNA, 329 bp, Artificial Sequence
  Description of Artificial Sequence: Synthetic polynucleotide
cagtctgtgctgactcagcctgcctccgtgtctggatctcctggacagtcgatcaccatctcctgcacaggagccagcagtgatgttgggcgttataagtttgtctcctggtaccaacaatccccagggaaagcccccaaactcattatttatgaggttacggagcggccctcaggggtttctaatcgcttctctggctccaagtctggcaacacggcctccctgacaatctctgggctccagcctgaggacgaggctgattatcactgctgctcgtatgcaggcactaacacttgggtgttcggcggagggacgaagctgaccgtcct

SEQ ID NO: 1137 - protein, 109 aa, Artificial Sequence
  Description of Artificial Sequence: Synthetic polypeptide
QSVLTQPASVSGSPGQSITISCTGASSDVGRYKFVSWYQQSPGKAPKLIIYEVTERPSGVSNRFSGSKSGNTASLTISGLQPEDEADYHCCSYAGTNTWVFGGGTKLTV

SEQ ID NO: 1138 - protein, 10 aa, Artificial Sequence
  Description of Artificial Sequence: Synthetic peptide
CSYAGTNTWV

SEQ ID NO: 1139 - DNA, 379 bp, Artificial Sequence
  Description of Artificial Sequence: Synthetic polynucleotide
gaggtgcagctgttggagtctgggggaaacttggtacagcctggggggtccctgagactctcctgtgcttcctctggattcacccttagcttttatgccatgaattgggtccgccaggctccagggaaggggctggagtgggtctcgtcgattagtggtagtggtggcagtggatactacgcagactctgtgaagggccggttcaccatctccagagaccattccaggaacaccctgtatttgcaaatgaacagcctgagagccgaggacacggccgtatattactgtgcgaaagagcgttcggactatggtgactacgggaaaccccctgatgcttttgatatctggggccaagggacaacggtcaccgtctcttcag

SEQ ID NO: 1140 - protein, 126 aa, Artificial Sequence
  Description of Artificial Sequence: Synthetic polypeptide
EVQLLESGGNLVQPGGSLRLSCASSGFTLSFYAMNWVRQAPGKGLEWVSSISGSGGSGYYADSVKGRFTISRDHSRNTLYLQMNSLRAEDTAVYYCAKERSDYGDYGKPPDAFDIWGQGTTVTVSS

SEQ ID NO: 1141 - protein, 19 aa, Artificial Sequence
  Description of Artificial Sequence: Synthetic peptide
AKERSDYGDYGKPPDAFDI

SEQ ID NO: 1142 - DNA, 322 bp, Artificial Sequence
  Description of Artificial Sequence: Synthetic polynucleotide
gacatccagatgacccagtctccttccaccctgtctgcatctgtcggagacagaatcagtatcacttgccgggccagtcagagtattagtacctggttggcctggtatcagcagaaaccagggaaagcccctaaactcctcatctatatggcgtctaatttagaaagtggggtcccatcaaggttcagcggcagtggatctgggacagaattcactctcaccatcagcagcctgcagcctgatgattttgcaacttattactgccaacagtataatagttacctgtacacttttggccaggggaccaagttggagatcaaac

SEQ ID NO: 1143 - protein, 107 aa, Artificial Sequence
  Description of Artificial Sequence: Synthetic polypeptide
DIQMTQSPSTLSASVGDRISITCRASQSISTWLAWYQQKPGKAPKLLIYMASNLESGVPSRFSGSGSGTEFTLTISSLQPDDFATYYCQQYNSYLYTFGQGTKLEIK

SEQ ID NO: 1144 - protein, 9 aa, Artificial Sequence
  Description of Artificial Sequence: Synthetic peptide
QQYNSYLYT

SEQ ID NO: 1145 - DNA, 361 bp, Artificial Sequence
  Description of Artificial Sequence: Synthetic polynucleotide
gaggtgcagctggtggagtctgggggaggtttggcgcggccgggggggtccctgagactctcctgtactgcctctggattcgccttcagtgattttagcatgaactgggtccgccaggctccagggaagggactggagtgggtgtcatatattagtagtcggagtggaatcacatactacgcagcctctctggagggccgattcaccatctccagagacgacgccaagaactcactgtatttgcaaatgaagtacctgagacccgaggacacggctgtgtatttttgtgtgagagatcgaggagataattacaattacttcgcccactggggccccggaacctgggtcaccgtctcctcag

SEQ ID NO: 1146 - protein, 120 aa, Artificial Sequence
  Description of Artificial Sequence: Synthetic polypeptide
EVQLVESGGGLARPGGSLRLSCTASGFAFSDFSMNWVRQAPGKGLEWVSYISSRSGITYYAASLEGRFTISRDDAKNSLYLQMKYLRPEDTAVYFCVRDRGDNYNYFAHWGPGTWVTVSS

SEQ ID NO: 1147 - protein, 13 aa, Artificial Sequence
  Description of Artificial Sequence: Synthetic peptide
VRDRGDNYNYFAH

SEQ ID NO: 1148 - DNA, 325 bp, Artificial Sequence
  Description of Artificial Sequence: Synthetic polynucleotide
gacatccagatgacccagtctccttccaccctgtctgcatctgtaggagacagagtcaccatcacttgccgggccagtgagaatattaagacttggttggcctggtatcagcagaaaccagggaaagcccctaagctcctgatctataaggcgtctactttagaaagtggggtcccatcaagattcagtggcagtgggtctgggacaggattcactctcaccatcagcagcctgcagcctgatgactttggaacttattactgccaacaatataatacttatagtcaactcactttcggcggagggaccaaggtggagatcaaac

SEQ ID NO: 1149 - protein, 108 aa, Artificial Sequence
  Description of Artificial Sequence: Synthetic polypeptide
DIQMTQSPSTLSASVGDRVTITCRASENIKTWLAWYQQKPGKAPKLLIYKASTLESGVPSRFSGSGSGTGFTLTISSLQPDDFGTYYCQQYNTYSQLTFGGGTKVEIK

SEQ ID NO: 1150 - protein, 10 aa, Artificial Sequence
  Description of Artificial Sequence: Synthetic peptide
QQYNTYSQLT

SEQ ID NO: 1151 - DNA, 349 bp, Artificial Sequence
  Description of Artificial Sequence: Synthetic polynucleotide
caggtgcagctggtgcagtctggggctgaggtgaagaagcctgggtcctcggtgaaggtctcctgcagggtatctggaggcaccttcaacacctatcctatcagctgggtgcgacaggcccctggacaagggcttgagtggatgggagggatcatccctgtctttggtacagtaaactacgcacagaagttcaagggcagagtcaccattaccgcggacgaatccacgagcacagcctacatggaactgagcagcctgagatctgaagacacggccgtctattattgtgcgaggggatacagttatggtgactactggggccagggaaccctgatcaccgtctcctcag

SEQ ID NO: 1152 - protein, 116 aa, Artificial Sequence
  Description of Artificial Sequence: Synthetic polypeptide
QVQLVQSGAEVKKPGSSVKVSCRVSGGTFNTYPISWVRQAPGQGLEWMGGIIPVFGTVNYAQKFKGRVTITADESTSTAYMELSSLRSEDTAVYYCARGYSYGDYWGQGTLITVSS

SEQ ID NO: 1153 - protein, 9 aa, Artificial Sequence
  Description of Artificial Sequence: Synthetic peptide
ARGYSYGDY

SEQ ID NO: 1154 - DNA, 325 bp, Artificial Sequence
  Description of Artificial Sequence: Synthetic polynucleotide
gacatccagatgacccagtctccatcctccctgtctgcatctgttggagacagagtcaccatcacttgccaggcgagtcaggacattagaaactatgtaaattggtatcagcagaaaccagggaaagccccaaagctcctgatctacgatgcatccaatttggaaacaggggtcccatcaaggttcagtgcaagaggatctgggacacattttactttcaccatcagcagcctgcagcctgaagatgttgcaacatattactgtcaacagtatgataatctccccagtgggacttttggccaggggaccaaactggagatcaaac

SEQ ID NO: 1155 - protein, 108 aa, Artificial Sequence
  Description of Artificial Sequence: Synthetic polypeptide
DIQMTQSPSSLSASVGDRVTITCQASQDIRNYVNWYQQKPGKAPKLLIYDASNLETGVPSRFSARGSGTHFTFTISSLQPEDVATYYCQQYDNLPSGTFGQGTKLEIK

SEQ ID NO: 1156 - protein, 10 aa, Artificial Sequence
  Description of Artificial Sequence: Synthetic peptide
QQYDNLPSGT

SEQ ID NO: 1157 - DNA, 393 bp, Artificial Sequence
  Description of Artificial Sequence: Synthetic polynucleotide
gaggtgcagctgttggagtctgggggaggcttggttcagcctggggggtccctgagactctcctgtgctgcctctggatcaccttttgggaattatgccatggcctgggtccgccaggctccagggaaggggctggagtgggtctccagtattcatagtgatggaactacatactacgtagactccgtgaagggccggttcagcatctccagagacaattccaagaacacgttgtttctgcagatgaacagcctgagagccgaggacacggccgtctattactgttcgaaattcaattattacttagatactagtggttattactctggtcctcctttctacttctactacatggacgtctggggcaaagggaccacggtcaccgtctcctca

SEQ ID NO: 1158 - protein, 131 aa, Artificial Sequence
  Description of Artificial Sequence: Synthetic polypeptide
EVQLLESGGGLVQPGGSLRLSCAASGSPFGNYAMAWVRQAPGKGLEWVSSIHSDGTTYYVDSVKGRFSISRDNSKNTLFLQMNSLRAEDTAVYYCSKFNYYLDTSGYYSGPPFYFYYMDVWGKGTTVTVSS

SEQ ID NO: 1159 - protein, 25 aa, Artificial Sequence
  Description of Artificial Sequence: Synthetic peptide
SKFNYYLDTSGYYSGPPFYFYYMDV

SEQ ID NO: 1160 - DNA, 322 bp, Artificial Sequence
  Description of Artificial Sequence: Synthetic polynucleotide
gacatccagatgacccagtctccttccaccctgtctgcatttgtgggagacagagtcaccatcacttgccgggccagtcaaagtattgatacctggttggcctggtatcagcagaaaccagggaaagcccctaaactcctgatctataaggcgtctactttagaaagtggggtcccttcaaggttcggcggcagtggatctgggacagaattcactctcaccatcagcagcctgcagcctgatgattttgcaacttattactgccaacaatttattagttacccatacacgtttggccaggggaccaaagtggagatcaaac

SEQ ID NO: 1161 - protein, 107 aa, Artificial Sequence
  Description of Artificial Sequence: Synthetic polypeptide
DIQMTQSPSTLSAFVGDRVTITCRASQSIDTWLAWYQQKPGKAPKLLIYKASTLESGVPSRFGGSGSGTEFTLTISSLQPDDFATYYCQQFISYPYTFGQGTKVEIK

SEQ ID NO: 1162 - protein, 9 aa, Artificial Sequence
  Description of Artificial Sequence: Synthetic peptide
QQFISYPYT

SEQ ID NO: 1163 - DNA, 349 bp, Artificial Sequence
  Description of Artificial Sequence: Synthetic polynucleotide
caggtgcagctggtgcagtctggggctgaggtgaagaagcctgggtcctcggtgaaggtctcctgcaaggcttctggaggcaccttcagcaattatgagatcacctgggtgcgacaggcccctggacaagggcttgagtggatgggagggatcatccctgtctttggaacaccaaactacgcacagaaattccaggtcagagtcaaaattaccgcggacgaatccacgaccacagcctacatggagctgagcagactgagatctgaagacacggccgtatattactgtgcgagaggggtctggggtttggactactggggccagggaaccctggtcaccgtctcctcag

SEQ ID NO: 1164 - protein, 116 aa, Artificial Sequence
  Description of Artificial Sequence: Synthetic polypeptide
QVQLVQSGAEVKKPGSSVKVSCKASGGTFSNYEITWVRQAPGQGLEWMGGIIPVFGTPNYAQKFQVRVKITADESTTTAYMELSRLRSEDTAVYYCARGVWGLDYWGQGTLVTVSS

SEQ ID NO: 1165 - protein, 9 aa, Artificial Sequence
  Description of Artificial Sequence: Synthetic peptide
ARGVWGLDY

SEQ ID NO: 1166 - DNA, 325 bp, Artificial Sequence
  Description of Artificial Sequence: Synthetic polynucleotide
gaaattgtgttgacgcagtctccaggcaccctgtctttgtctccaggcgaaagagccaccctctcctgcagggccagtcagagtgttaacagcgactacttaacctggtaccagcagaaacctggccaggctcccaggctcctcatctatggtacatccaccagggccactggcatcccagacagattcagtggcagtgggtctgggacagacttcactctcaccatcagtagactggagcctgaagattttgcagtttattactgtcagcagtttggtaactcaccaatgacgttcggccaagggaccaaggtggaaatcaaac

SEQ ID NO: 1167 - protein, 108 aa, Artificial Sequence
  Description of Artificial Sequence: Synthetic polypeptide
EIVLTQSPGTLSLSPGERATLSCRASQSVNSDYLTWYQQKPGQAPRLLIYGTSTRATGIPDRFSGSGSGTDFTLTISRLEPEDFAVYYCQQFGNSPMTFGQGTKVEIK

SEQ ID NO: 1168 - protein, 9 aa, Artificial Sequence
  Description of Artificial Sequence: Synthetic peptide
QQFGNSPMT

SEQ ID NO: 1169 - DNA, 364 bp, Artificial Sequence
  Description of Artificial Sequence: Synthetic polynucleotide
caggtgcagctggtgcagtctgggactgaggtgaagaagcctggggcctcagtgaaggtctcctgtaagacatctggatacaccttcaccacccactacatgcactgggtgcgccaggcccctggacgagggcttgagtggatgggactcatcaaccctggtggtcctactacatcctactcacagaggttcgagggcagaatcaccatgaccagtgacacttccacgagcacgttctacatggaattgagccgcctgagatctgaagacacggccttctactactgtgcgagaggggacttctggtacggggaatctttatttgactcttggggccagggaaccctggtcaccgtctcctcag

SEQ ID NO: 1170 - protein, 121 aa, Artificial Sequence
  Description of Artificial Sequence: Synthetic polypeptide
QVQLVQSGTEVKKPGASVKVSCKTSGYTFTTHYMHWVRQAPGRGLEWMGLINPGGPTTSYSQRFEGRITMTSDTSTSTFYMELSRLRSEDTAFYYCARGDFWYGESLFDSWGQGTLVTVSS

SEQ ID NO: 1171 - protein, 14 aa, Artificial Sequence
  Description of Artificial Sequence: Synthetic peptide
ARGDFWYGESLFDS

SEQ ID NO: 1172 - DNA, 343 bp, Artificial Sequence
  Description of Artificial Sequence: Synthetic polynucleotide
gacatcgtgatgacccagtctccagactccctggctgtgtctctgggcgagagggccaccatcaactgcaagtccagccagagtcttttatacagcgccaacaataagaattccttagcttggtaccagcagagaccaggacagcctcctaagttgctcatttactgggcatctacgcgggtctccggggtccctgaccgattcagcggcagcgggtctgggacagatttcactctctccatcagcagcctgcaggctgaagatgtggcagtttattactgtcaacaatattataatactcctccggtgacgttcggccaagggaccaaggtggaaatcaaac

SEQ ID NO: 1173 - protein, 114 aa, Artificial Sequence
  Description of Artificial Sequence: Synthetic polypeptide
DIVMTQSPDSLAVSLGERATINCKSSQSLLYSANNKNSLAWYQQRPGQPPKLLIYWASTRVSGVPDRFSGSGSGTDFTLSISSLQAEDVAVYYCQQYYNTPPVTFGQGTKVEIK

SEQ ID NO: 1174 - protein, 10 aa, Artificial Sequence
  Description of Artificial Sequence: Synthetic peptide
QQYYNTPPVT

SEQ ID NO: 1175 - DNA, 376 bp, Artificial Sequence
  Description of Artificial Sequence: Synthetic polynucleotide
gaggtgcagctgttggagtctgggggaggcttggtacagcctggggggtccctgagactctcctgtgcagcctctggattcacctttagcaagtatgccatgagctgggtccgccaggctccagggaaggggctggagtgggtctcaggtattagtggcagtggtggtggcacatactacgcagactccgtgaagggccggttcaccatctccagagacaattccaagaacacgctgtatctgcaaatgaacagcctgagagccgaggacacggccgtatattactgtgcgaaagatcagggtgacgatttttggagtggttattccctttactttgactactggggccagggaaccctggtcaccgtctcctcag

SEQ ID NO: 1176 - protein, 125 aa, Artificial Sequence
  Description of Artificial Sequence: Synthetic polypeptide
EVQLLESGGGLVQPGGSLRLSCAASGFTFSKYAMSWVRQAPGKGLEWVSGISGSGGGTYYADSVKGRFTISRDNSKNTLYLQMNSLRAEDTAVYYCAKDQGDDFWSGYSLYFDYWGQGTLVTVSS

SEQ ID NO: 1177 - protein, 18 aa, Artificial Sequence
  Description of Artificial Sequence: Synthetic peptide
AKDQGDDFWSGYSLYFDY

SEQ ID NO: 1178 - DNA, 319 bp, Artificial Sequence
  Description of Artificial Sequence: Synthetic polynucleotide
gacatccagatgacccagtctccatcctccctgtctgcatctgtaggagacagagtcaccatcacttgccgggcaagtcagagcattaccagctatttaaattggtatcaacaaaaaccagggaaagcccctaagctcctgatctttgctgcatccaatttgcaaagtggggtcccatcaaggttcagtggcagtggatctgggacacatttcactctcaccatcagcagtctgcaacctgaagattttgcaagttactactgtcaacagacttacagtccgctcactttcggcggagggaccaaggtggagatcaaac

SEQ ID NO: 1179 - protein, 106 aa, Artificial Sequence
  Description of Artificial Sequence: Synthetic polypeptide
DIQMTQSPSSLSASVGDRVTITCRASQSITSYLNWYQQKPGKAPKLLIFAASNLQSGVPSRFSGSGSGTHFTLTISSLQPEDFASYYCQQTYSPLTFGGGTKVEIK

SEQ ID NO: 1180 - protein, 8 aa, Artificial Sequence
  Description of Artificial Sequence: Synthetic peptide
QQTYSPLT

SEQ ID NO: 1181 - DNA, 349 bp, Artificial Sequence
  Description of Artificial Sequence: Synthetic polynucleotide
caggtgcagctggtgcagtctggggctgaaatgaagaagcctgggtcctcggtgaaggtctcgtgcaaggcttctggaggcaccttcaacacctttcctatctcctgggtgcgacaggcccctggacaagggcttgagtggatgggagggatcatccctgtctttgggacgccaaactacgcacagaaattccagggcagagtcaccattaccgcggacaaatccacgggaacagtcttcttggaactgaggagcctgcgatctgacgactcggccgtctattattgtgcgagagataattgggggttcgacccctggggccagggaaccctggtcaccgtctcctcag

SEQ ID NO: 1182 - protein, 116 aa, Artificial Sequence
  Description of Artificial Sequence: Synthetic polypeptide
QVQLVQSGAEMKKPGSSVKVSCKASGGTFNTFPISWVRQAPGQGLEWMGGIIPVFGTPNYAQKFQGRVTITADKSTGTVFLELRSLRSDDSAVYYCARDNWGFDPWGQGTLVTVSS

SEQ ID NO: 1183 - protein, 9 aa, Artificial Sequence
  Description of Artificial Sequence: Synthetic peptide
ARDNWGFDP

SEQ ID NO: 1184 - DNA, 319 bp, Artificial Sequence; identical to SEQ ID NO: 1178
  Description of Artificial Sequence: Synthetic polynucleotide

SEQ ID NO: 1185 - protein, 106 aa, Artificial Sequence; identical to SEQ ID NO: 1179
  Description of Artificial Sequence: Synthetic polypeptide

SEQ ID NO: 1186 - protein, 8 aa, Artificial Sequence
  Description of Artificial Sequence: Synthetic peptide
QQTYSPLT

SEQ ID NO: 1187 - DNA, 352 bp, Artificial Sequence
  Description of Artificial Sequence: Synthetic polynucleotide
caggtgcagctggtgcagtctggggctgaagtgaagaagcctgggtcctcggtgaaggtctcctgcagggcttctggaggcaccttcagcaattatcctatcacgtgggtgcgacaggcccctggacaaggacttgagtggatgggacgaatcatccctgtctttcgtacaccgaacttcgcacagaagttccagggcagagtctccattaccgcggacgagtccacgagcacagcctatatggagctgagcagtctgagatctgaggacacggccgtctattactgtgcgagatcgtccggttttccatcgcttgactactggggccagggaacccttgtcaccgtgtcct

SEQ ID NO: 1188 - protein, 117 aa, Artificial Sequence
  Description of Artificial Sequence: Synthetic polypeptide
QVQLVQSGAEVKKPGSSVKVSCRASGGTFSNYPITWVRQAPGQGLEWMGRIIPVFRTPNFAQKFQGRVSITADESTSTAYMELSSLRSEDTAVYYCARSSGFPSLDYWGQGTLVTVS

SEQ ID NO: 1189 - protein, 11 aa, Artificial Sequence
  Description of Artificial Sequence: Synthetic peptide
ARSSGFPSLDY

SEQ ID NO: 1190 - DNA, 325 bp, Artificial Sequence
  Description of Artificial Sequence: Synthetic polynucleotide
gaaattgtgttgacgcagtctccaggcaccctgtctttgcctccaggggaaagagccaccctctcctgcagggccagtcagagtgttaacagcgactacttagcctggtaccagcagaagcctggccaggctcccaggctcctcatctatggtgcatccaccagggccactggcatccccgcgaggttcagtggcagtggctctgggacagacttcactctcaccatcagcagactggagcctgaagatgttgcagtgtattactgtcaacagcatggtagctcaccgtacacttttggccaggggaccaagctggagatcaaac

SEQ ID NO: 1191 - protein, 108 aa, Artificial Sequence
  Description of Artificial Sequence: Synthetic polypeptide
EIVLTQSPGTLSLPPGERATLSCRASQSVNSDYLAWYQQKPGQAPRLLIYGASTRATGIPARFSGSGSGTDFTLTISRLEPEDVAVYYCQQHGSSPYTFGQGTKLEIK

SEQ ID NO: 1192 - protein, 9 aa, Artificial Sequence
  Description of Artificial Sequence: Synthetic peptide
QQHGSSPYT

SEQ ID NO: 1193 - DNA, 346 bp, Artificial Sequence
  Description of Artificial Sequence: Synthetic polynucleotide
caggtgcagctgcaggagtcgggcccaggactggtgaagccttcggagaccctgtccctcacctgcactgtctctggtggctccatcagtcattactactggagctggatccggcagcccccagggaagggactggagtggattgggtatatctattctggtgggagcaccaactacaacccctccctcaagagtcgagtcaccatatcagtagacacgtccaagaaccagttctccctgaagctgagctctgtgaccgccgcagacacggccgtgtattactgtgcgagacacctttatggtttcgacaactggggccagggaaccctggtcaccgtctcctcag

SEQ ID NO: 1194 - protein, 115 aa, Artificial Sequence
  Description of Artificial Sequence: Synthetic polypeptide
QVQLQESGPGLVKPSETLSLTCTVSGGSISHYYWSWIRQPPGKGLEWIGYIYSGGSTNYNPSLKSRVTISVDTSKNQFSLKLSSVTAADTAVYYCARHLYGFDNWGQGTLVTVSS

SEQ ID NO: 1195 - protein, 9 aa, Artificial Sequence
  Description of Artificial Sequence: Synthetic peptide
ARHLYGFDN

SEQ ID NO: 1196 - DNA, 322 bp, Artificial Sequence
  Description of Artificial Sequence: Synthetic polynucleotide
gacatccagatgacccagtctccatcctccctgtctgcatctgtaggagacagagtcaccatcacttgccaggcgagtcaggacattagtaacaatttaagttggtatcagcagaaaccagggaaagcccctaagctcctgatctacgacgcatccaatttggaagcaggggtccactcaaggttcagtggaagtggatctgggacagattttactttcaccatcagcagcctgcagcctgaagatattgcaacatattactgtcaacagtatgataatttccctcggactttcggccctgggaccaaagtggatatcaaac

SEQ ID NO: 1197 - protein, 107 aa, Artificial Sequence
  Description of Artificial Sequence: Synthetic polypeptide
DIQMTQSPSSLSASVGDRVTITCQASQDISNNLSWYQQKPGKAPKLLIYDASNLEAGVHSRFSGSGSGTDFTFTISSLQPEDIATYYCQQYDNFPRTFGPGTKVDIK

SEQ ID NO: 1198 - protein, 9 aa, Artificial Sequence
  Description of Artificial Sequence: Synthetic peptide
QQYDNFPRT

SEQ ID NO: 1199 - DNA, 352 bp, Artificial Sequence
  Description of Artificial Sequence: Synthetic polynucleotide
  modified_base (343)..(343): a, c, t, g, unknown or other
  modified_base (346)..(346): a, c, t, g, unknown or other
caggtgcagctggtgcagtctggggctgaggtgaagaagcctgggtcctcggtgagggtctcctgcaagaagacctctggaggcaccttcagccactatcctatcagctgggtgcgacaggcccctggacaagggcttgagtggatgggagggatcatccctgtctttggtacagtaaactacgctcagaagttccagggcagagccacgataaccgcggacgaatcttcgagcacagcctacttggaattgagcagcctgagatctgaggacactgccgtttattactgtgcgacgggattcagttatggtgactactggggccagggaaccctggtcaccnccncctcag

SEQ ID NO: 1200 - protein, 117 aa, Artificial Sequence
  Description of Artificial Sequence: Synthetic polypeptide
  MOD_RES (115)..(116): Any amino acid
QVQLVQSGAEVKKPGSSVRVSCKKTSGGTFSHYPISWVRQAPGQGLEWMGGIIPVFGTVNYAQKFQGRATITADESSSTAYLELSSLRSEDTAVYYCATGFSYGDYWGQGTLVTXXS

SEQ ID NO: 1201 - protein, 9 aa, Artificial Sequence
  Description of Artificial Sequence: Synthetic peptide
ATGFSYGDY

SEQ ID NO: 1202 - DNA, 325 bp, Artificial Sequence
  Description of Artificial Sequence: Synthetic polynucleotide
gacatccagatgacccagtctccatcctccctgtctgcatctattggagacagagtcaccatcagttgccaggcgagtcaggacattaagaagaatttaaattggtatcaacagaaaccagggaaagcccctaagctcctgatctacgatgcatccaatttggaaacaggggtcccatcgaggttcattggaagtggatctgggacagattttactttcaccatcaacagcctgcagcctgaagatattgcaacatattactgtcaacagtatgataatctccccagtggctcttttggccaggggaccaggctggagatcaaac

SEQ ID NO: 1203 - protein, 108 aa, Artificial Sequence
  Description of Artificial Sequence: Synthetic polypeptide
DIQMTQSPSSLSASIGDRVTISCQASQDIKKNLNWYQQKPGKAPKLLIYDASNLETGVPSRFIGSGSGTDFTFTINSLQPEDIATYYCQQYDNLPSGSFGQGTRLEIK

SEQ ID NO: 1204 - protein, 10 aa, Artificial Sequence
  Description of Artificial Sequence: Synthetic peptide
QQYDNLPSGS

SEQ ID NO: 1205 - DNA, 364 bp, Artificial Sequence
  Description of Artificial Sequence: Synthetic polynucleotide
caggtgcagctggtggagtctgggggaggcgtggtccagcctgggaggtccctgagactctcctgtgcagcctctggattcagcttcagttcctatgccatgcactgggtccgccaggctccaggcaaggggctggagtgggtggcagtgatatcagatgatggaagtcaaatagagtatgggaactccgtgaaggggcgagtcgtcatctccagagacaattccaagaatacgctgtatctgcaagtgaacagcctgagacctggggatacggctatatattattgtgcaaaagatggcagtggctgggttgacaactggctcgtttcctggggccagggaaccctggtcaccgtctcctcag

SEQ ID NO: 1206 - protein, 121 aa, Artificial Sequence
  Description of Artificial Sequence: Synthetic polypeptide
QVQLVESGGGVVQPGRSLRLSCAASGFSFSSYAMHWVRQAPGKGLEWVAVISDDGSQIEYGNSVKGRVVISRDNSKNTLYLQVNSLRPGDTAIYYCAKDGSGWVDNWLVSWGQGTLVTVSS

SEQ ID NO: 1207 - protein, 14 aa, Artificial Sequence
  Description of Artificial Sequence: Synthetic peptide
AKDGSGWVDNWLVS

SEQ ID NO: 1208 - DNA, 322 bp, Artificial Sequence
  Description of Artificial Sequence: Synthetic polynucleotide
gaaatagtgatgacgcagtctccagccaccctgtctttgtctccaggggaaagagccaccctctcctgcagggccggtcggagtgttaccagcaacttagcctggtaccagcagaaacctgggcaggctcccaggctcctcatctatggtgcatccaccagggcctctggtattccagtcaggttcagtggcagtgggtctgggacagagttcactctcagtatcagcagcctgcagtctgaagattctgcagtttattactgtcagcagtataataattggccgctcacgttcggcggagggaccaaggtggagatcaaac

SEQ ID NO: 1209 - protein, 107 aa, Artificial Sequence
  Description of Artificial Sequence: Synthetic polypeptide
EIVMTQSPATLSLSPGERATLSCRAGRSVTSNLAWYQQKPGQAPRLLIYGASTRASGIPVRFSGSGSGTEFTLSISSLQSEDSAVYYCQQYNNWPLTFGGGTKVEIK

SEQ ID NO: 1210 - protein, 9 aa, Artificial Sequence
  Description of Artificial Sequence: Synthetic peptide
QQYNNWPLT

SEQ ID NO: 1211 - DNA, 367 bp, Artificial Sequence
  Description of Artificial Sequence: Synthetic polynucleotide
caggtacagctgcagcagtcaggtccaagactggtgaagcccttgcagaccctctcactcacctgtgccatctccggggacagtgtctctagcaacagtgctacttggaactggatcaggcagtcgccatcgagaggccttgagtggctgggaaggacatactacaggtccgagtggtatactgattatgcagaatctgtgaaaagtcgagtaaccttcagcgcagactcatccaagaaccagttctccctgcagttgaactctgtgactcccgaggacacggctgtctattactgtgcaagggcgcaccagtggcccctgcgctttgactcctggggccagggaaccctggtcaccgtctcctcag

SEQ ID NO: 1212 - protein, 122 aa, Artificial Sequence
  Description of Artificial Sequence: Synthetic polypeptide
QVQLQQSGPRLVKPLQTLSLTCAISGDSVSSNSATWNWIRQSPSRGLEWLGRTYYRSEWYTDYAESVKSRVTFSADSSKNQFSLQLNSVTPEDTAVYYCARAHQWPLRFDSWGQGTLVTVSS

SEQ ID NO: 1213 - protein, 12 aa, Artificial Sequence
  Description of Artificial Sequence: Synthetic peptide
ARAHQWPLRFDS

SEQ ID NO: 1214 - DNA, 325 bp, Artificial Sequence
  Description of Artificial Sequence: Synthetic polynucleotide
gacatccagatgacccagtctccatcctccctgtctgcatctgtaggagacagagtcaccatcacttgccgggcaagtcagagtattgacaattatttaaattggtatcagcaaaagccagggaaagcccctaaactcctgatctatgctgcatccaaattgcaaagtggggtcccatcaaggttcagtggcagtggatctgggacagaattcactctcaccatcagcagtctgcaacgtgaagattttgcaacttactactgtcaacaggcttacagtacccctccactcaccttcggcccagggacacgactggagattaaac

SEQ ID NO: 1215 - protein, 108 aa, Artificial Sequence
  Description of Artificial Sequence: Synthetic polypeptide
DIQMTQSPSSLSASVGDRVTITCRASQSIDNYLNWYQQKPGKAPKLLIYAASKLQSGVPSRFSGSGSGTEFTLTISSLQREDFATYYCQQAYSTPPLTFGPGTRLEIK

SEQ ID NO: 1216 - protein, 10 aa, Artificial Sequence
  Description of Artificial Sequence: Synthetic peptide
QQAYSTPPLT

SEQ ID NO: 1217 - DNA, 355 bp, Artificial Sequence
  Description of Artificial Sequence: Synthetic polynucleotide
caggtgcagctggtgcagtctggggctgaggtgaagaagcctgggtcctcggtgaaggtctcctgcaaggcttctggaggcaccttcagcaactatgctatcagctgggtgcgacaggcccctggacaagggcttgagtggatgggagggatcatccctcactttcgaacagtaaactacgcacagaagttccagggcagagtcacgattaccgcggacacatccacgagcacgggctacatggaactgagtagcctgacctctgaggacacggccgtgtattactgtacgagagcctttgggtccacggggggtgactactggggccagggaaccctggtcaccgtctcctcag

SEQ ID NO: 1218 - protein, 118 aa, Artificial Sequence
  Description of Artificial Sequence: Synthetic polypeptide
QVQLVQSGAEVKKPGSSVKVSCKASGGTFSNYAISWVRQAPGQGLEWMGGIIPHFRTVNYAQKFQGRVTITADTSTSTGYMELSSLTSEDTAVYYCTRAFGSTGGDYWGQGTLVTVSS

SEQ ID NO: 1219 - protein, 11 aa, Artificial Sequence
  Description of Artificial Sequence: Synthetic peptide
TRAFGSTGGDY

SEQ ID NO: 1220 - DNA, 325 bp, Artificial Sequence
  Description of Artificial Sequence: Synthetic polynucleotide
gacatccagatgacccagtctccatcctccctgtctgcatctgtaggagacagagtcaccatcacttgccaggcgagtcaggacattagcaactatttaaattggtatcaacagaaaccagggaaagcccctaagctcctgatctacgatgcattcaatttggaaacaggggtcccatcaaggttcagtggaagtggatctgggacagattttaccttcaccatcagcagcctgcagcctgaagatattgcaacatattactgtcaacagtatgataatctccctcgaggcacgttcggcggagggaccaaggtggagatcaaac

SEQ ID NO: 1221 - protein, 108 aa, Artificial Sequence
  Description of Artificial Sequence: Synthetic polypeptide
DIQMTQSPSSLSASVGDRVTITCQASQDISNYLNWYQQKPGKAPKLLIYDAFNLETGVPSRFSGSGSGTDFTFTISSLQPEDIATYYCQQYDNLPRGTFGGGTKVEIK

SEQ ID NO: 1222 - protein, 10 aa, Artificial Sequence
  Description of Artificial Sequence: Synthetic peptide
QQYDNLPRGT

SEQ ID NO: 1223 - DNA, 358 bp, Artificial Sequence
  Description of Artificial Sequence: Synthetic polynucleotide
caggtgcagctggtgcagtctggggctgaagtgaagaagcctgggtcctcggtgaaggtctcctgcaaggcttctggaggcaccttcgccaactatgctttcagctgggtgcgacaggcccctggacaagggcttgtgtggatgggaggaatcatccctgtctttggtacacccaactacgcacagaagttccaaggcagagtcacgattaccgcggacacatccacgagcacagcctatatggaactgagcggcctgagatctgacgacacggccgtgtattactgtgcgagagacgggggagcagtggctgcttatgcctactggggccagggaaccctggtcaccgtctcctcag

SEQ ID NO: 1224 - protein, 119 aa, Artificial Sequence
  Description of Artificial Sequence: Synthetic polypeptide
QVQLVQSGAEVKKPGSSVKVSCKASGGTFANYAFSWVRQAPGQGLVWMGGIIPVFGTPNYAQKFQGRVTITADTSTSTAYMELSGLRSDDTAVYYCARDGGAVAAYAYWGQGTLVTVSS

SEQ ID NO: 1225 - protein, 12 aa, Artificial Sequence
  Description of Artificial Sequence: Synthetic peptide
ARDGGAVAAYAY

SEQ ID NO: 1226 - DNA, 325 bp, Artificial Sequence
  Description of Artificial Sequence: Synthetic polynucleotide
  modified_base (25)..(25): a, c, t, g, unknown or other
  modified_base (28)..(28): a, c, t, g, unknown or other
gacatccagatgacccagtctccantcnccctgtctgcatctgtaggagacagagtcaccatcacttgccaggcgagtcaagacattagtcactatttaaattggtatcaacagagaccagggaaagcccctaaactcctgatctacgatgcatccaatttggaaacaggggtcccatcaaggttcagtggaagtggatctgggacacattttactttcaccatcagcagcctgcagcctgaagatattgcaacatattactgtcaacaatataatagtctccctggatccactttcggccctgggaccaaagtggatgtcaaac

SEQ ID NO: 1227 - protein, 108 aa, Artificial Sequence
  Description of Artificial Sequence: Synthetic polypeptide
  MOD_RES (9)..(10): Any amino acid
DIQMTQSPXXLSASVGDRVTITCQASQDISHYLNWYQQRPGKAPKLLIYDASNLETGVPSRFSGSGSGTHFTFTISSLQPEDIATYYCQQYNSLPGSTFGPGTKVDVK

SEQ ID NO: 1228 - protein, 10 aa, Artificial Sequence
  Description of Artificial Sequence: Synthetic peptide
QQYNSLPGST

SEQ ID NO: 1229 - DNA, 349 bp, Artificial Sequence
  Description of Artificial Sequence: Synthetic polynucleotide
caggtgcagctggtgcagtctggggctgaggtgaggaagcctgggtcctcggtgaaggtctcctgcaaggcttctggaggcagcttcaacacctattctatcagctgggtccgacaggcccctggacaagggcttgagtggatgggaaggatcatccctatctttggtacaccaaactacgcacagaaattccagggcagagtcaccattaccgcggacaaatccccgagtacagtctacatggagctgagcagcctgagatctgacgacacggccgtgtattattgtgcgagagataattgggggttcgacccctggggccagggaaccctggtcaccgtctcctcag

SEQ ID NO: 1230 - protein, 116 aa, Artificial Sequence
  Description of Artificial Sequence: Synthetic polypeptide
QVQLVQSGAEVRKPGSSVKVSCKASGGSFNTYSISWVRQAPGQGLEWMGRIIPIFGTPNYAQKFQGRVTITADKSPSTVYMELSSLRSDDTAVYYCARDNWGFDPWGQGTLVTVSS

SEQ ID NO: 1231 - protein, 9 aa, Artificial Sequence
  Description of Artificial Sequence: Synthetic peptide
ARDNWGFDP

SEQ ID NO: 1232 - DNA, 325 bp, Artificial Sequence
  Description of Artificial Sequence: Synthetic polynucleotide
gaaattgtgttgacgcagtctccaggcaccctgtctttgtctccaggggaaagagccaccctctcctgcagggccagtcagagtgttaacagcgactacttagcctggtaccagcagaaacctggccaggctcccaggctcctcatctatggtgcagccaccagggccactggcatcccagacaggttcagtggcagtgggtctgggacagacttcactctcaccatcaacagactggagcctgaagattttgcagtatatttctgtcagcagtctggtagctcacagtacacttttggccaggggaccaagctggagatcaaac

SEQ ID NO: 1233 - protein, 108 aa, Artificial Sequence
  Description of Artificial Sequence: Synthetic polypeptide
EIVLTQSPGTLSLSPGERATLSCRASQSVNSDYLAWYQQKPGQAPRLLIYGAATRATGIPDRFSGSGSGTDFTLTINRLEPEDFAVYFCQQSGSSQYTFGQGTKLEIK

SEQ ID NO: 1234 - protein, 9 aa, Artificial Sequence
  Description of Artificial Sequence: Synthetic peptide
QQSGSSQYT

SEQ ID NO: 1235 - DNA, 352 bp, Artificial Sequence
  Description of Artificial Sequence: Synthetic polynucleotide
caggtgcagctggtgcagtctggggctgaggtgaagaagcctgggtcctcggttaaggtctcctgcaagacttctggaggcaccttcagcaactatgctatcaactgggtgcgacaggcccctggacaagggcttgagtggatgggacagatcatccctgtctttggtacaccaaactacgcacagaagttccagggcaggctcacgattaccgcggacgaatccaccagcacaggctacatggaattgagtagcctgagatctgaggacacggccgtctattattgtgcgagagatggaagtggtcactttgactattggggccagggaaccctggtcagcgtctcctcag

SEQ ID NO: 1236 - protein, 117 aa, Artificial Sequence
  Description of Artificial Sequence: Synthetic polypeptide
QVQLVQSGAEVKKPGSSVKVSCKTSGGTFSNYAINWVRQAPGQGLEWMGQIIPVFGTPNYAQKFQGRLTITADESTSTGYMELSSLRSEDTAVYYCARDGSGHFDYWGQGTLVSVSS

SEQ ID NO: 1237 - protein, 10 aa, Artificial Sequence
  Description of Artificial Sequence: Synthetic peptide
ARDGSGHFDY

SEQ ID NO: 1238 - DNA, 322 bp, Artificial Sequence
  Description of Artificial Sequence: Synthetic polynucleotide
gacatccagatgacccagtctccatcctccctgtctgcatctttaggagacagagtcatcatcacttgccgggcaagtcagggcattagaaatcaattaggctggtatcagcagaaaccagggaaagcccctgagcgcctgatctatgaagcatcctttttggaaactggggtcccatcaaggttcagcggcagtggatctgggacagaattcactctcacaatcagcagcctggagcctgaagattttgcaacttattattgtctgcagcataaaagttaccctctcaccttcggcggagggaccaaggtggagatcaaac

SEQ ID NO: 1239 - protein, 107 aa, Artificial Sequence
  Description of Artificial Sequence: Synthetic polypeptide
DIQMTQSPSSLSASLGDRVIITCRASQGIRNQLGWYQQKPGKAPERLIYEASFLETGVPSRFSGSGSGTEFTLTISSLEPEDFATYYCLQHKSYPLTFGGGTKVEIK

SEQ ID NO: 1240 - protein, 9 aa, Artificial Sequence
  Description of Artificial Sequence: Synthetic peptide
LQHKSYPLT

SEQ ID NO: 1241 - DNA, 358 bp, Artificial Sequence
  Description of Artificial Sequence: Synthetic polynucleotide
caggtccagctggtgcagtctggggctgaggtgaagaagcctgggtcctcggtgaaggtctcctgcaaggcttctggaggcaccttcagcaatcatctcatcgggtgggtgcgacaggcccctggacaagggcttgagtggatgggagggatcatccctgtctttggtccagcaaagtacgcacagaagttccagggcagagtcaccatcaccgcggacgaatccacgagcacagcttatattgagttgagcagcctgagatctgaagacacggccgtttattattgtgcgagagatgggggggcagtggctggtctctcctactggggccagggaaccctggtcaccgtctcctcag

SEQ ID NO: 1242 - protein, 119 aa, Artificial Sequence
  Description of Artificial Sequence: Synthetic polypeptide
QVQLVQSGAEVKKPGSSVKVSCKASGGTFSNHLIGWVRQAPGQGLEWMGGIIPVFGPAKYAQKFQGRVTITADESTSTAYIELSSLRSEDTAVYYCARDGGAVAGLSYWGQGTLVTVSS

SEQ ID NO: 1243 - protein, 12 aa, Artificial Sequence
  Description of Artificial Sequence: Synthetic peptide
ARDGGAVAGLSY

SEQ ID NO: 1244 - DNA, 322 bp, Artificial Sequence
  Description of Artificial Sequence: Synthetic polynucleotide
gacatccagatgacccagtctccttccaccctgtctgcatctgtcggaggcagagtcaccatcacttgccgggccagtcagagtcttactaggagctcattggcctggtatcaacagaaaccaggaaaatcccctaaactcctgatctacagcgcgtctgttttagaagatggggtctcatcaaggttcagcggcagtggatctgggacagaattcactctcaccatcagcagcctgcagcctgatgattttgcaacttattactgccaacaatatactagttattccgggacgttcggcccagggaccagggtggaactca

SEQ ID NO: 1245 - protein, 107 aa, Artificial Sequence
  Description of Artificial Sequence: Synthetic polypeptide
DIQMTQSPSTLSASVGGRVTITCRASQSLTRSSLAWYQQKPGKSPKLLIYSASVLEDGVSSRFSGSGSGTEFTLTISSLQPDDFATYYCQQYTSYSGTFGPGTRVEL

SEQ ID NO: 1246 - protein, 9 aa, Artificial Sequence
  Description of Artificial Sequence: Synthetic peptide
QQYTSYSGT

SEQ ID NO: 1247 - DNA, 355 bp, Artificial Sequence
  Description of Artificial Sequence: Synthetic polynucleotide
caggtgcagctggtgcagtctggggctgaggtgaagaagcctgggtcctcggtgaaggtctcctgcaaggcttctggaggcaccttcagcaactttgcaatcaactgggtgcgacaggcccctggacaagggcttgagtggatgggagggatcatccctgtctttggcacagcaaactacgcacagaagtttcagggcagagtcacgattaccgcggacgagtccacgagaacagcctacatggagataagtagactgagatctgaggacacggccgtgttttactgtgcgagagtgggaggttcggggagtcttgacgactggggccaggggaccctggtcaccgtctcctcag

SEQ ID NO: 1248 - protein, 118 aa, Artificial Sequence
  Description of Artificial Sequence: Synthetic polypeptide
QVQLVQSGAEVKKPGSSVKVSCKASGGTFSNFAINWVRQAPGQGLEWMGGIIPVFGTANYAQKFQGRVTITADESTRTAYMEISRLRSEDTAVFYCARVGGSGSLDDWGQGTLVTVSS

SEQ ID NO: 1249 - protein, 11 aa, Artificial Sequence
  Description of Artificial Sequence: Synthetic peptide
ARVGGSGSLDD

SEQ ID NO: 1250 - DNA, 337 bp, Artificial Sequence
  Description of Artificial Sequence: Synthetic polynucleotide
gatattgtgatgactcagtctccactctccctgcccgtcacccctggagagccggcctccatctcctgcaggtctagtcagagcctcctgcatagggatggatacaactatttggattggtacctgcagaagccagggcagtctccacaactcctgatctatatgggttttaatcgggcctccggggtccctgacaggttcagtggcagtggatcaggcacagattttacactgaaaatcagcagagtggaggctgaggatgttggggtttattactgcatgcaagctctacaaactcctaatacttttggccaggggaccaagctggaaatcaaac

SEQ ID NO: 1251 - protein, 112 aa, Artificial Sequence
  Description of Artificial Sequence: Synthetic polypeptide
DIVMTQSPLSLPVTPGEPASISCRSSQSLLHRDGYNYLDWYLQKPGQSPQLLIYMGFNRASGVPDRFSGSGSGTDFTLKISRVEAEDVGVYYCMQALQTPNTFGQGTKLEIK

SEQ ID NO: 1252 - protein, 9 aa, Artificial Sequence
  Description of Artificial Sequence: Synthetic peptide
MQALQTPNT

SEQ ID NO: 1253 - DNA, 349 bp, Artificial Sequence
  Description of Artificial Sequence: Synthetic polynucleotide
caggtgcagctggtgcagtctggggctgaagtgaagatgcctgggtcctcggtgagggtctcctgcaagtcttctggaggcacattcagcagttattctttcaagtgggttcgacaggcccctggacaggggcttcagtggatgggggggatcagccctctatctgggacagtcaactacgcacgggagttccagggcagagtcacaatttctgcgagcgcatccacgagcacagtcttcatggatttgagcggcctgagagctgaggacacggccatgtattactgtgcgaaatggtctaccgggtttgacttctggggccacggaaccctggtcaccgtctcctcag

SEQ ID NO: 1254 - protein, 116 aa, Artificial Sequence
  Description of Artificial Sequence: Synthetic polypeptide
QVQLVQSGAEVKMPGSSVRVSCKSSGGTFSSYSFKWVRQAPGQGLQWMGGISPLSGTVNYAREFQGRVTISASASTSTVFMDLSGLRAEDTAMYYCAKWSTGFDFWGHGTLVTVSS

SEQ ID NO: 1255 - protein, 9 aa, Artificial Sequence
  Description of Artificial Sequence: Synthetic peptide
AKWSTGFDF

SEQ ID NO: 1256 - DNA, 327 bp, Artificial Sequence
  Description of Artificial Sequence: Synthetic polynucleotide
gaaattgtgttgacacagtctccagccaccctgtctttgtctccaggggaaagagccaccctctcctgcagggccagtcagagtgttagcggctccttagactggtacatccacaagcctggccagcctcccaggctcctcatctatgatacatccaacagggccaatggcatcccagccaggttcagtggcagtgggtctgggacagacttcactctcaccatcagcagcctagaccctgaagaatttgcattttattattgtcagcatcgtagcaaatggcctcctgtgttcactttcggcggagggaccagggtggagatcaaa

SEQ ID NO: 1257 - protein, 109 aa, Artificial Sequence
  Description of Artificial Sequence: Synthetic polypeptide
EIVLTQSPATLSLSPGERATLSCRASQSVSGSLDWYIHKPGQPPRLLIYDTSNRANGIPARFSGSGSGTDFTLTISSLDPEEFAFYYCQHRSKWPPVFTFGGGTRVEIK

SEQ ID NO: 1258 - protein, 11 aa, Artificial Sequence
  Description of Artificial Sequence: Synthetic peptide
QHRSKWPPVFT

SEQ ID NO: 1259 - DNA, 384 bp, Artificial Sequence
  Description of Artificial Sequence: Synthetic polynucleotide
caggtgcagctggtgcagtctggggctgaggtgaagaagccggggtcctcggtgaaggtctcctgcaaggcttctggaggcaacttcaggagctacgctatcagctgggtgcgacaggcccctggacaagggcttgagtggatgggaggggtcatccctatgtttggctcagttaactacgcacagacgttccagggcagagtcacgatgaccgcggacgaatccacgagcacagtctacatggagctgagcagcctgagatctgaggacacggccgtgtattactgtgcgagagataagggggaagcagtgcctggtacagattactactacttctactacatggacgtctggggcaaagggaccacggtcaccgtctcctca

SEQ ID NO: 1260 - protein, 128 aa, Artificial Sequence
  Description of Artificial Sequence: Synthetic polypeptide
QVQLVQSGAEVKKPGSSVKVSCKASGGNFRSYAISWVRQAPGQGLEWMGGVIPMFGSVNYAQTFQGRVTMTADESTSTVYMELSSLRSEDTAVYYCARDKGEAVPGTDYYYFYYMDVWGKGTTVTVSS

SEQ ID NO: 1261 - protein, 21 aa, Artificial Sequence
  Description of Artificial Sequence: Synthetic peptide
ARDKGEAVPGTDYYYFYYMDV

SEQ ID NO: 1262 - DNA, 325 bp, Artificial Sequence
  Description of Artificial Sequence: Synthetic polynucleotide
gaaattgtgttgacgcagtctccaggcaccctgtctttgtctccaggggaaagagtcaccctctcctgcagggccagtcagagtgttagcagcagctacttagcctggtaccagcagaaacctggccaggctcccagcctcctcatctatggtgcctctaccagggcctctggcatcccagacaggttcagtggcagtgggtctgggacagacttcactctcaccatcagcagactggagcctgaagattttgcagtgtattactgtcagcattatgatacctcaccgtacacttttggccaggggaccaagctggagatcaaac

SEQ ID NO: 1263 - protein, 108 aa, Artificial Sequence
  Description of Artificial Sequence: Synthetic polypeptide
EIVLTQSPGTLSLSPGERVTLSCRASQSVSSSYLAWYQQKPGQAPSLLIYGASTRASGIPDRFSGSGSGTDFTLTISRLEPEDFAVYYCQHYDTSPYTFGQGTKLEIK

SEQ ID NO: 1264 - protein, 9 aa, Artificial Sequence
  Description of Artificial Sequence: Synthetic peptide
QHYDTSPYT

SEQ ID NO: 1265 - DNA, 384 bp, Artificial Sequence
  Description of Artificial Sequence: Synthetic polynucleotide
caggtgcagctggtgcagtctggggctgaggtgaagaagcctgggtcctcggtgaaggtctcctgcaaggcttctggaggcagtttcagcagttttgctatcagctgggtgcggcaggcccctggacaacggcttgagtggatgggagggatcatccctatatttcatagaccaaactatggacagaagttccacggcagactcacgattaccgcggacgaatccacgagcacagtctacatggagctgagcagcctgagatctgaggacacggccatatattactgtgcgagagatcagggcgagtttataactggaacggattactactacttctactacatggacgtctggggcgaggggaccacggtcaccgtctcctca

SEQ ID NO: 1266 - protein, 128 aa, Artificial Sequence
  Description of Artificial Sequence: Synthetic polypeptide
QVQLVQSGAEVKKPGSSVKVSCKASGGSFSSFAISWVRQAPGQRLEWMGGIIPIFHRPNYGQKFHGRLTITADESTSTVYMELSSLRSEDTAIYYCARDQGEFITGTDYYYFYYMDVWGEGTTVTVSS

SEQ ID NO: 1267 - protein, 21 aa, Artificial Sequence
  Description of Artificial Sequence: Synthetic peptide
ARDQGEFITGTDYYYFYYMDV

SEQ ID NO: 1268 - DNA, 325 bp, Artificial Sequence
  Description of Artificial Sequence: Synthetic polynucleotide
gaaattgtgttgacgcagtctccaggcaccctgtctttgtctccaggggaaagagccaccctctcgtgcagggccagtgagagtgttaacagcatctatttcgcctggtatcaacagaaacctggccaggctcccaggctcctcatgtctggtgcttccagcagggccaccggcatcccagacaggttcagtggcagtgggtctgggacagacttcactctcaccatcagcagactggagcctgaagattttgcaatttattactgtcagcaatatactagctcgccggggacgttcggccaagggaccaaggtggaaatcaaac

SEQ ID NO: 1269 - protein, 108 aa, Artificial Sequence
  Description of Artificial Sequence: Synthetic polypeptide
EIVLTQSPGTLSLSPGERATLSCRASESVNSIYFAWYQQKPGQAPRLLMSGASSRATGIPDRFSGSGSGTDFTLTISRLEPEDFAIYYCQQYTSSPGTFGQGTKVEIK

SEQ ID NO: 1270 - protein, 9 aa, Artificial Sequence
  Description of Artificial Sequence: Synthetic peptide
QQYTSSPGT

SEQ ID NO: 1271 - DNA, 349 bp, Artificial Sequence
  Description of Artificial Sequence: Synthetic polynucleotide
gaggtgcagctggtggagtctgggggaggcctggtcaagcctggggggtccctgagactctcctgtgcagcctctgggttcaccttcagtcactataacatgaactgggtccgccaggctccagggaagggactggagtgggtctcatccattagttatagtgggaattacatatattacgcagactcactgaagggccgattcaccatctctcgagacaacgccaagaactcactatatctgcagatgaacagcctgacagccgaggacacggctgtgtatttctgcgcgaggccctatggtggctttgaccactggggcccgggaaccctggtcaccgtctcctcag

SEQ ID NO: 1272 - protein, 116 aa, Artificial Sequence
  Description of Artificial Sequence: Synthetic polypeptide
EVQLVESGGGLVKPGGSLRLSCAASGFTFSHYNMNWVRQAPGKGLEWVSSISYSGNYIYYADSLKGRFTISRDNAKNSLYLQMNSLTAEDTAVYFCARPYGGFDHWGPGTLVTVSS

SEQ ID NO: 1273 - protein, 9 aa, Artificial Sequence
  Description of Artificial Sequence: Synthetic peptide
ARPYGGFDH

SEQ ID NO: 1274 - DNA, 322 bp, Artificial Sequence
  Description of Artificial Sequence: Synthetic polynucleotide
gccatccagttgacccagtctccatcctccctgtctgcatctataggggacagagtcaccatcacttgccgggcaagtcagggcattgggaatgctttagcctggtatcatcagacaccagggaaacctcctaggctcttgatctatgatgcctccactttgaatactggggtcccatcaaggttcagcggcggtggatctgggacagatttcactctctccatcaacagcctgcaacctgaagattttgcaacttattactgtcaacagtttagtaattacccgtacacttttggccaggggaccaagctggatatcaaac

SEQ ID NO: 1275 - protein, 107 aa, Artificial Sequence
  Description of Artificial Sequence: Synthetic polypeptide
AIQLTQSPSSLSASIGDRVTITCRASQGIGNALAWYHQTPGKPPRLLIYDASTLNTGVPSRFSGGGSGTDFTLSINSLQPEDFATYYCQQFSNYPYTFGQGTKLDIK

SEQ ID NO: 1276 - protein, 9 aa, Artificial Sequence
  Description of Artificial Sequence: Synthetic peptide
QQFSNYPYT

SEQ ID NO: 1277 - DNA, 367 bp, Artificial Sequence
  Description of Artificial Sequence: Synthetic polynucleotide
gaggtgcagctggtggagtctgggggaggcttggtacagccgggggggtccctgagactctcctgtgcagcctctggattcaccttcaatacctttggcatgaactgggtccgccaggctccagggaaggggctggagtgggttgcattcattgacagtagtggtagcaacatatactacgcagactctgtgaagggccgattcaccatctccagagacaatgccaagaaatcactgcatctgcaaatgaacagcctgagagccgaggacacggctgtgtatttctgtgcgagagatcgggcccagtggctgttttcggactactttgatttttggggccagggaaccctggtcagtgtctcctcag

SEQ ID NO: 1278 - protein, 122 aa, Artificial Sequence
  Description of Artificial Sequence: Synthetic polypeptide
EVQLVESGGGLVQPGGSLRLSCAASGFTFNTFGMNWVRQAPGKGLEWVAFIDSSGSNIYYADSVKGRFTISRDNAKKSLHLQMNSLRAEDTAVYFCARDRAQWLFSDYFDFWGQGTLVSVSS

SEQ ID NO: 1279 - protein, 15 aa, Artificial Sequence
  Description of Artificial Sequence: Synthetic peptide
ARDRAQWLFSDYFDF

SEQ ID NO: 1280 - DNA, 322 bp, Artificial Sequence
  Description of Artificial Sequence: Synthetic polynucleotide
gaaattgtgttgacacagtctccagccaccctgtctttgtctccaggggaaagagccaccctctcctgcagggccagtcagagtattagcacctacttagcctggtaccaacacaagcctggccagcctcccaggctcctcatctttgatgcatcccacagggccactgccatcccagccaggttcagtggcagtgggtctgggacagacttcactctcaccatcagcagcctagagcctgaagattttgcagtttattactgtcagcagcgtagccactggccggggacgttcggccaagggaccaaggtggaaatcaaac

SEQ ID NO: 1281 - protein, 107 aa, Artificial Sequence
  Description of Artificial Sequence: Synthetic polypeptide
EIVLTQSPATLSLSPGERATLSCRASQSISTYLAWYQHKPGQPPRLLIFDASHRATAIPARFSGSGSGTDFTLTISSLEPEDFAVYYCQQRSHWPGTFGQGTKVEIK

SEQ ID NO: 1282 - protein, 9 aa, Artificial Sequence
  Description of Artificial Sequence: Synthetic peptide
QQRSHWPGT

SEQ ID NO: 1283 - DNA, 373 bp, Artificial Sequence
  Description of Artificial Sequence: Synthetic polynucleotide
gaggtgcagctggtggagtctgggggaggcttggtacagcctggggggtccctgagactctcctgtgcagcttctggattcaccttcagtgactatagcatgaactgggtccgccaggctccagggaaggggctggagtgggtttcatacattagtagtggtggtagtgacatttattacgcaaactctgtggagggccgattcaccatctccagagacaacaccaagaattcactgtatctgcaaatggacagcctgagagccgaggacacggctgtgtattactgtgcgagggagactttcgtcaatttggctggcttttataacttctttgaccgctggggccagggaaccctggtcaccgtctcctcag

SEQ ID NO: 1284 - protein, 124 aa, Artificial Sequence
  Description of Artificial Sequence: Synthetic polypeptide
EVQLVESGGGLVQPGGSLRLSCAASGFTFSDYSMNWVRQAPGKGLEWVSYISSGGSDIYYANSVEGRFTISRDNTKNSLYLQMDSLRAEDTAVYYCARETFVNLAGFYNFFDRWGQGTLVTVSS

SEQ ID NO: 1285 - protein, 17 aa, Artificial Sequence
  Description of Artificial Sequence: Synthetic peptide
ARETFVNLAGFYNFFDR

SEQ ID NO: 1286 - DNA, 325 bp, Artificial Sequence
  Description of Artificial Sequence: Synthetic polynucleotide
gacatccagatgacccagtctccttccaccctgtctgcatctataggagacagagtcaccatcacttgccgggccagtcagagtattagaagctggttggcctggtatcagcagaaaccagggaaagcccctaaactcctgatctataaggcgtccagtttagaaagtggggtcccatcaaggttcagcggcagtggatctgggacggaattcactctcaccatcagcagcctgcagcctgatgattttggttcttattactgccaacagtataacactttttctgccatcactttcggccaagggacacgactggagattaaac

SEQ ID NO: 1287 - protein, 108 aa, Artificial Sequence
  Description of Artificial Sequence: Synthetic polypeptide
DIQMTQSPSTLSASIGDRVTITCRASQSIRSWLAWYQQKPGKAPKLLIYKASSLESGVPSRFSGSGSGTEFTLTISSLQPDDFGSYYCQQYNTFSAITFGQGTRLEIK

SEQ ID NO: 1288 - protein, 10 aa, Artificial Sequence
  Description of Artificial Sequence: Synthetic peptide
QQYNTFSAIT

SEQ ID NO: 1289 - DNA, 349 bp, Artificial Sequence
  Description of Artificial Sequence: Synthetic polynucleotide
caggtgcagctggtgcagtctggggctgaggtgaagaagcctgggtcctcggtgaaggtctcctgcaaggtctctggaggcaccttcggtcactttgctatcagttgggtgcgacaggcccctggacaagggcttgagtggatgggagggatcatccctgtctttggatcaacacattacatacagaagttccagggcagaatctcgattaccgcggaccaatccacgcgcaccgcctatctggagctgagtagcctaagctctgaggacacggccatctattactgtgcgacaggctacagctatggtgactactggggccagggaaccctggtcaccgtctcctcag

SEQ ID NO: 1290 - protein, 116 aa, Artificial Sequence
  Description of Artificial Sequence: Synthetic polypeptide
QVQLVQSGAEVKKPGSSVKVSCKVSGGTFGHFAISWVRQAPGQGLEWMGGIIPVFGSTHYIQKFQGRISITADQSTRTAYLELSSLSSEDTAIYYCATGYSYGDYWGQGTLVTVSS

SEQ ID NO: 1291 - protein, 9 aa, Artificial Sequence
  Description of Artificial Sequence: Synthetic peptide
ATGYSYGDY

SEQ ID NO: 1292 - DNA, 325 bp, Artificial Sequence
  Description of Artificial Sequence: Synthetic polynucleotide
gacatccagatgacccagtctccatcctccctgtctgcatctgtgggagacagagtcaccatcacctgccaggcgagtcaggacattaggaataatttaaattggtatcaacagaaaccagggaaagcccctaaactcctgatctacgatgcatccaatttggaaacaggggtctcatcaaggttcagtggaagtggatctgggacagatttcattttcaccatcaccagcctgcagcctgaagatattgcaacatattactgtcaacactataataatctccccctcgggactttcggcggagggaccaaggtggagttcaaac

SEQ ID NO: 1293 - protein, 108 aa, Artificial Sequence
  Description of Artificial Sequence: Synthetic polypeptide
DIQMTQSPSSLSASVGDRVTITCQASQDIRNNLNWYQQKPGKAPKLLIYDASNLETGVSSRFSGSGSGTDFIFTITSLQPEDIATYYCQHYNNLPLGTFGGGTKVEFK

SEQ ID NO: 1294 - protein, 10 aa, Artificial Sequence
  Description of Artificial Sequence: Synthetic peptide
QHYNNLPLGT

SEQ ID NO: 1295 - DNA, 382 bp, Artificial Sequence
  Description of Artificial Sequence: Synthetic polynucleotide
caggtgcagctgcaggagtcgggcccaggactggtgaagccttcacagaccctgtccctcacctgcactgtctctggtgactccatcaccaatggtgagtcgtactggaattggatccgccagcccccagggaagggcctggagtggattgggtacatctatcgcagcgggaccgcctactacaacccgtccctcaagagtcgcgtttccctgtcactggacacgtccaagagccaattctccctgaagctcacctctgtgactgccgcagacacggccatttattactgtgccagaggccgccgacaggatttttggagtggttattggccacccggatttgacttctggggccagggaaccctggtcaccgtctcctcag

SEQ ID NO: 1296 - protein, 127 aa, Artificial Sequence
  Description of Artificial Sequence: Synthetic polypeptide
QVQLQESGPGLVKPSQTLSLTCTVSGDSITNGESYWNWIRQPPGKGLEWIGYIYRSGTAYYNPSLKSRVSLSLDTSKSQFSLKLTSVTAADTAIYYCARGRRQDFWSGYWPPGFDFWGQGTLVTVSS

SEQ ID NO: 1297 - protein, 19 aa, Artificial Sequence
  Description of Artificial Sequence: Synthetic peptide
ARGRRQDFWSGYWPPGFDF

SEQ ID NO: 1298 - DNA, 325 bp, Artificial Sequence
  Description of Artificial Sequence: Synthetic polynucleotide
gacatccagatgacccagtctccatcctccctgtctgcatctgtaggagacagagtcactatcacttgccgggcaagccagagcattgacatctatttaaattggtatcagcagaaatcagggatggcccctaagctcctgatctatgccgcatccaatttgcaaagtggggtcccatcaaggttcagtggcagtggatctgggacagatttcactctcaccatcagcagtcttcaacctgaagattttgcaacttactactgtcaacaaagttacagtacccctccgctcaccttcggccaagggacacgactggagattaaac

SEQ ID NO: 1299 - protein, 108 aa, Artificial Sequence
  Description of Artificial Sequence: Synthetic polypeptide
DIQMTQSPSSLSASVGDRVTITCRASQSIDIYLNWYQQKSGMAPKLLIYAASNLQSGVPSRFSGSGSGTDFTLTISSLQPEDFATYYCQQSYSTPPLTFGQGTRLEIK

SEQ ID NO: 1300 - protein, 10 aa, Artificial Sequence
  Description of Artificial Sequence: Synthetic peptide
QQSYSTPPLT

SEQ ID NO: 1301 - DNA, 388 bp, Artificial Sequence
  Description of Artificial Sequence: Synthetic polynucleotide
caggtgcagctggtggagtctgggggaggcgtggtccagcctgggaggtccctgagactctcctgtgcagcctctgtattcaccttcagtaactttgccatgcactgggtccgccaggctcctggcaaggggctggagtgggtggcagttatttcatatgatggaagtgataaatactatgcagactccgtgaagggccgattcaccatctccagagacaattccaagaagaaagtgtatctggaaatgaacagcctgagaactgaggacacggctgtgtattactgtgcgaaagattcgcagaattacgattattggagcggtaatttattcgacgggggctactttgacaactggggccagggaaccctggtcaccgtctcctcag

SEQ ID NO: 1302 - protein, 129 aa, Artificial Sequence
  Description of Artificial Sequence: Synthetic polypeptide
QVQLVESGGGVVQPGRSLRLSCAASVFTFSNFAMHWVRQAPGKGLEWVAVISYDGSDKYYADSVKGRFTISRDNSKKKVYLEMNSLRTEDTAVYYCAKDSQNYDYWSGNLFDGGYFDNWGQGTLVTVSS

SEQ ID NO: 1303 - protein, 22 aa, Artificial Sequence
  Description of Artificial Sequence: Synthetic peptide
AKDSQNYDYWSGNLFDGGYFDN

SEQ ID NO: 1304 - DNA, 322 bp, Artificial Sequence
  Description of Artificial Sequence: Synthetic polynucleotide
gacatccagatgacccagtctccttccaccctgtctgcatctataggagacagagtcaccatcacttgccgggccagtcaggatattagtagctacttggcctggtatcagcagaaagttgggaaagcccctaaactcctcatctatgtggcgtctcgtctagaaagtggggtcccgtcaaggttcagcggcattagatctgggacagaattcactctcaccatcagcagcctgcagcctgatgattttgcaacttattactgccagcaatatcttagttaccctcggacgttcggccaagggaccaaggtggaattcaaac

SEQ ID NO: 1305 - protein, 107 aa, Artificial Sequence
  Description of Artificial Sequence: Synthetic polypeptide
DIQMTQSPSTLSASIGDRVTITCRASQDISSYLAWYQQKVGKAPKLLIYVASRLESGVPSRFSGIRSGTEFTLTISSLQPDDFATYYCQQYLSYPRTFGQGTKVEFK

SEQ ID NO: 1306 - protein, 9 aa, Artificial Sequence
  Description of Artificial Sequence: Synthetic peptide
QQYLSYPRT

SEQ ID NO: 1307 - DNA, 368 bp, Artificial Sequence
  Description of Artificial Sequence: Synthetic polynucleotide
gaggtgcagctggtggagtctgggggaggcctggtcaagcctggggggtccctgagactctcctgtgtaggcagtggattcaggctcggtagaaatagaatgaattgggtccgccaggctccagggaaggggctggagtgggtctcatgtgttaatgacattggtggtgacatatactacgcagactcagtggagggccgattcaccatctccagagacaacgccaagaactcactctatcttgaaatgaacagcctgagagtcgaggacacggctgtatattattgtgcgagaaattccggcgacgaccacggtgactattcgtacttcgatgtctggggccgtggcaccctggtcactgtctcctc

SEQ ID NO: 1308 - protein, 122 aa, Artificial Sequence
  Description of Artificial Sequence: Synthetic polypeptide
EVQLVESGGGLVKPGGSLRLSCVGSGFRLGRNRMNWVRQAPGKGLEWVSCVNDIGGDIYYADSVEGRFTISRDNAKNSLYLEMNSLRVEDTAVYYCARNSGDDHGDYSYFDVWGRGTLVTVS

SEQ ID NO: 1309 - protein, 16 aa, Artificial Sequence
  Description of Artificial Sequence: Synthetic peptide
ARNSGDDHGDYSYFDV

SEQ ID NO: 1310 - DNA, 325 bp, Artificial Sequence
  Description of Artificial Sequence: Synthetic polynucleotide
gacatccagatgacccagtctccttccaccctgtctgcatctgtcggagacagagtcagtatcacttgtcgggccagtcagagcattaataggtggttggcctggtatcagcagaaaccaggaaaagcccctaagctcctgatctataaggcgtcgagtttacaaagtggggtcccatcaaggttcggcggcagtggatctgggacagaattcactctcaccatcagcaacctacagcctgatgattttgcaacttattactgccaacaatataatacttattctgcaatcactttcggcggagggaccaaggtggagatcaaac

SEQ ID NO: 1311 - protein, 108 aa, Artificial Sequence
  Description of Artificial Sequence: Synthetic polypeptide
DIQMTQSPSTLSASVGDRVSITCRASQSINRWLAWYQQKPGKAPKLLIYKASSLQSGVPSRFGGSGSGTEFTLTISNLQPDDFATYYCQQYNTYSAITFGGGTKVEIK

SEQ ID NO: 1312 - protein, 10 aa, Artificial Sequence
  Description of Artificial Sequence: Synthetic peptide
QQYNTYSAIT

SEQ ID NO: 1313 - DNA, 377 bp, Artificial Sequence
  Description of Artificial Sequence: Synthetic polynucleotide
caggtccagctggtacagtctggggctgaggtgaagaagcctggggcctcagtgaaggtctcctgcaaaatttccggatccaccctcagtgaattttccatgcactgggtgcgacaggctcctggaaaagggcttgagtggatgggaagttttgatcctcagaatggagaaacgatctacgcacaaaagttgcagggcagagtcaccatgaccgaggacacatctgcagacacagcctacatggaactgagtagtctgagatctgaggacacggccgtgtattattgtacaacagcgcggaacgagtattggagtggtttctcatctatgtactactttgaatattggggccagggaaccctggtcaccgtctcctc

SEQ ID NO: 1314 - protein, 125 aa, Artificial Sequence
  Description of Artificial Sequence: Synthetic polypeptide
QVQLVQSGAEVKKPGASVKVSCKISGSTLSEFSMHWVRQAPGKGLEWMGSFDPQNGETIYAQKLQGRVTMTEDTSADTAYMELSSLRSEDTAVYYCTTARNEYWSGFSSMYYFEYWGQGTLVTVS

SEQ ID NO: 1315 - protein, 19 aa, Artificial Sequence
  Description of Artificial Sequence: Synthetic peptide
TTARNEYWSGFSSMYYFEY

SEQ ID NO: 1316 - DNA, 337 bp, Artificial Sequence
  Description of Artificial Sequence: Synthetic polynucleotide
gatattgtgatgactcagtctccactctccctgcccgtcacccctggagagccggcctccatctcctgcaggtctagtcagagcctcctgcatagtaatggatacaactatttggattggtacctgcagaagccagggcagtctccacaactcctaatctatatgggttctactcgggcctccggggtccctgacaggttcagtggcagtggatcaggcacagattttacactgaaaatcagcagagtggaggctgaagatgttggggtttattactgcatgcaagctctacacactccgcggactttcggcggagggaccaaggtggagatcaaac

SEQ ID NO: 1317 - protein, 112 aa, Artificial Sequence
  Description of Artificial Sequence: Synthetic polypeptide
DIVMTQSPLSLPVTPGEPASISCRSSQSLLHSNGYNYLDWYLQKPGQSPQLLIYMGSTRASGVPDRFSGSGSGTDFTLKISRVEAEDVGVYYCMQALHTPRTFGGGTKVEIK

SEQ ID NO: 1318 - protein, 9 aa, Artificial Sequence
  Description of Artificial Sequence: Synthetic peptide
MQALHTPRT

SEQ ID NO: 1319 - DNA, 358 bp, Artificial Sequence
  Description of Artificial Sequence: Synthetic polynucleotide
caggtgcagctggtgcagtctggggctgaggtgaagaagcctgggtcctcggtgaaggtctcctgcaaggcttctggaggcaccttcagcaactttctgatctcctgggtgcgacaggcccctggacaagggcttgagtggatgggagggatcatccctgtctttggtacagcaaactacgcacagaagttccagggcagagtcacgattaccgcggacgaatccacgagcacagcctacatggatctgagcagcctgaaagctgacgacacggccgtgtattactgtgcgagagattcaggagctactgcgtcctatgactactggggccagggaaccctggtcaccgtctcctcag

SEQ ID NO: 1320 - protein, 119 aa, Artificial Sequence
  Description of Artificial Sequence: Synthetic polypeptide
QVQLVQSGAEVKKPGSSVKVSCKASGGTFSNFLISWVRQAPGQGLEWMGGIIPVFGTANYAQKFQGRVTITADESTSTAYMDLSSLKADDTAVYYCARDSGATASYDYWGQGTLVTVSS

SEQ ID NO: 1321 - protein, 12 aa, Artificial Sequence
  Description of Artificial Sequence: Synthetic peptide
ARDSGATASYDY

SEQ ID NO: 1322 - DNA, 322 bp, Artificial Sequence
  Description of Artificial Sequence: Synthetic polynucleotide
gacatccagatgacccagtctccatcctccctgtctgcatctgtaggagacagagtcaccatcacttgccgggcaagtcagagcattagcacttatttaaattggtatcagcagaagtcagggaatgcccctaagctcctgatctatactgcatccaatttgcaaagtggggtcccgtcaagattcagtggcagtggatctgggacagatttcactctcaccatcagcagtctgcaacctgaagattttgcaacttactactgtcaacagagttacaggacccctcactcttttggccaggggaccaagctggagatcaaac

SEQ ID NO: 1323 - protein, 107 aa, Artificial Sequence
  Description of Artificial Sequence: Synthetic polypeptide
DIQMTQSPSSLSASVGDRVTITCRASQSISTYLNWYQQKSGNAPKLLIYTASNLQSGVPSRFSGSGSGTDFTLTISSLQPEDFATYYCQQSYRTPHSFGQGTKLEIK

SEQ ID NO: 1324 - protein, 9 aa, Artificial Sequence
  Description of Artificial Sequence: Synthetic peptide
QQSYRTPHS

SEQ ID NO: 1325 - DNA, 349 bp, Artificial Sequence
  Description of Artificial Sequence: Synthetic polynucleotide
caggtgcagctggtgcagtctgggactgaggtgaagaagcctgggtcctcggtgaaggtctcctgcaagacttctggaggcaccttcagcaactatgcaatctactgggtgcgacaggcccctggacaaggacttgagtggatgggagggatcatccctttctttggttcaccaaactacgcacagaggtttcagggcagagtcacgattactgcggacgcgtccacgagcacagcctacatggaactgagtaccctgagatctgacgacacggccatctattactgtgcgagaggtgtctggggctatgactactggggccagggaaccctggtcaccgtctcctcag

SEQ ID NO: 1326 - protein, 116 aa, Artificial Sequence
  Description of Artificial Sequence: Synthetic polypeptide
QVQLVQSGTEVKKPGSSVKVSCKTSGGTFSNYAIYWVRQAPGQGLEWMGGIIPFFGSPNYAQRFQGRVTITADASTSTAYMELSTLRSDDTAIYYCARGVWGYDYWGQGTLVTVSS

SEQ ID NO: 1327 - protein, 9 aa, Artificial Sequence
  Description of Artificial Sequence: Synthetic peptide
ARGVWGYDY

SEQ ID NO: 1328 - DNA, 322 bp, Artificial Sequence
  Description of Artificial Sequence: Synthetic polynucleotide
gaaattgtgttgacgcagtctccaggcaccctgtctttgtctccaggggaaagagccaccctctcctgcagggccagtcagagtgttagcagcgactacttagcctggtaccagcagaaacctggccaggctcccaggcttttcatctatggtgcatccaccagggccactggcatcccagacaggttcagtggcagtgggtctgggacagacttcactctcaccatcagcagactggagcctgaagattttgcagtgtattactgtcaccactatgggaactcacaggcgttcggccaagggaccaaggtggaaatcaaac

SEQ ID NO: 1329 - protein, 107 aa, Artificial Sequence
  Description of Artificial Sequence: Synthetic polypeptide
EIVLTQSPGTLSLSPGERATLSCRASQSVSSDYLAWYQQKPGQAPRLFIYGASTRATGIPDRFSGSGSGTDFTLTISRLEPEDFAVYYCHHYGNSQAFGQGTKVEIK

SEQ ID NO: 1330 - protein, 8 aa, Artificial Sequence
  Description of Artificial Sequence: Synthetic peptide
HHYGNSQA

SEQ ID NO: 1331 - DNA, 364 bp, Artificial Sequence
  Description of Artificial Sequence: Synthetic polynucleotide
caggtgcagctgcaggagtcgggcccaggactggtgaagccttcggagaccctgtccctcacctgctctgtctctggtggctccatcaggacttactactggacctggatccggcagaccccagggaagggactggagtggattgcgtctatctattatagtgggggccccaattacaacccctccctcaagagtcgagtcaccatgtcagtagacacgtctaagaatcagttttccctgaagttgacctctgtgaccgccgcagatacggccgtctatttctgtgcgaggctgcgagttgggagtcgctcgaccgaagcgtttgatatctggggccaagggacaatggtcgccgtctcttcag

SEQ ID NO: 1332 - protein, 121 aa, Artificial Sequence
  Description of Artificial Sequence: Synthetic polypeptide
QVQLQESGPGLVKPSETLSLTCSVSGGSIRTYYWTWIRQTPGKGLEWIASIYYSGGPNYNPSLKSRVTMSVDTSKNQFSLKLTSVTAADTAVYFCARLRVGSRSTEAFDIWGQGTMVAVSS

SEQ ID NO: 1333 - protein, 15 aa, Artificial Sequence
  Description of Artificial Sequence: Synthetic peptide
ARLRVGSRSTEAFDI

SEQ ID NO: 1334 - DNA, 322 bp, Artificial Sequence
  Description of Artificial Sequence: Synthetic polynucleotide
gacatccagatgacccagtctccatcctccctgtctgcatctgtaggagacagagtcaccatcacttgccgggcaagtcagagtattagcaactatttaaattggtatcagcagaaaccagggaaagcccctaggctcctgatctatgctgcatccagtttgcaaagtggggtcccatcaaagttcagtggcagtggatctgggacagatttcactctcaccatcagcagtctgcaacctgaagattttgcaacttacttctgtcaacagagttacagtgccccctggacgttcggccaagggaccaaggtagaaagcaaac

SEQ ID NO: 1335 - protein, 107 aa, Artificial Sequence
  Description of Artificial Sequence: Synthetic polypeptide
DIQMTQSPSSLSASVGDRVTITCRASQSISNYLNWYQQKPGKAPRLLIYAASSLQSGVPSKFSGSGSGTDFTLTISSLQPEDFATYFCQQSYSAPWTFGQGTKVESK

SEQ ID NO: 1336 - protein, 9 aa, Artificial Sequence
  Description of Artificial Sequence: Synthetic peptide
QQSYSAPWT

SEQ ID NO: 1337 - DNA, 352 bp, Artificial Sequence
  Description of Artificial Sequence: Synthetic polynucleotide
caggtgcagctggtgcagtctggggctgaggtgaagaagcctgggtcctcggtgaaggtctcctgcaaggcctctggaggcatcttcagcaactatggtatcaactgggtgcgacaggcccctggacaagggcttgagtggatgggagggatcatccctgcctttgggacaccaaattacgcacagaaattccagggcagagtcaccattaacgcggacacatccacgagcacagcctacatggcgctgagcagcctgagcgctgacgacacggccgtgtatttctgtgcgagagatggctacattccccttgcctactggggccagggaaccctggtcaccgtctcgtcag

SEQ ID NO: 1338 - protein, 117 aa, Artificial Sequence
  Description of Artificial Sequence: Synthetic polypeptide
QVQLVQSGAEVKKPGSSVKVSCKASGGIFSNYGINWVRQAPGQGLEWMGGIIPAFGTPNYAQKFQGRVTINADTSTSTAYMALSSLSADDTAVYFCARDGYIPLAYWGQGTLVTVSS

SEQ ID NO: 1339 - protein, 10 aa, Artificial Sequence
  Description of Artificial Sequence: Synthetic peptide
ARDGYIPLAY

SEQ ID NO: 1340 - DNA, 340 bp, Artificial Sequence
  Description of Artificial Sequence: Synthetic polynucleotide
gatattgtgatgacccagactccactctctctgtccgtcacccctggacagccggcctccatctcctgcaagtcaagtcagagcctccaacatagagatggaaagacctatttgaattggttcctgcagaagccaggccagcctccacagctcctgatctatgaagttttcaaccggttctctggagtgccagatagattcagtggcagcgggtcagggacagatttcacactgagaatcagccgggtggaggctgaggatgttggggtttattactgcatgcaaactatacagcttttcccggtcacgttcggcggagggaccaaggtagagatcaaac

SEQ ID NO: 1341 - protein, 113 aa, Artificial Sequence
  Description of Artificial Sequence: Synthetic polypeptide
DIVMTQTPLSLSVTPGQPASISCKSSQSLQHRDGKTYLNWFLQKPGQPPQLLIYEVFNRFSGVPDRFSGSGSGTDFTLRISRVEAEDVGVYYCMQTIQLFPVTFGGGTKVEIK

SEQ ID NO: 1342 - protein, 10 aa, Artificial Sequence
  Description of Artificial Sequence: Synthetic peptide
MQTIQLFPVT

SEQ ID NO: 1343 - DNA, 386 bp, Artificial Sequence
  Description of Artificial Sequence: Synthetic polynucleotide
caggtgcagctggtggagtctgggggaggcgtggtccagcctgggaggtccctgagactctcctgtgcagcctctggattcaccttcaatacatatggcatgcattgggtccgccaggctccaggcaaggggctggaatgggtggcagttatatcatatgatggaagtaataaatattatgcagactccgtgaagggccgattcaccatctccagagacaattccaagaacacgctgtatctgcaaatgaacagtctgagacgtgaggacacggctatttattactgtgcgaaagaccgtctgtattacgatttctggagtggtttcagtgactactactatggtatggacgtctggggccaagggaccacggtcaccgtctcctc

SEQ ID NO: 1344 - protein, 128 aa, Artificial Sequence
  Description of Artificial Sequence: Synthetic polypeptide
QVQLVESGGGVVQPGRSLRLSCAASGFTFNTYGMHWVRQAPGKGLEWVAVISYDGSNKYYADSVKGRFTISRDNSKNTLYLQMNSLRREDTAIYYCAKDRLYYDFWSGFSDYYYGMDVWGQGTTVTVS

SEQ ID NO: 1345 - protein, 22 aa, Artificial Sequence
  Description of Artificial Sequence: Synthetic peptide
AKDRLYYDFWSGFSDYYYGMDV

SEQ ID NO: 1346 - DNA, 328 bp, Artificial Sequence
  Description of Artificial Sequence: Synthetic polynucleotide
gacatccagatgacccagtctccatcctccctgtctgcatctgtaggagacagagtcaccatcacttgccaggcgagtcagggcattagtaatgatttaaattggtatcagcagaaaccagggaaagcccttaagctcctgatctacgatacatccaatttgcaaacaggggtcccatcaaggttcagtggaagtggagctgggacagattttactctcaccatcaccagcctgcagcctgaagacattggaacatattactgtcaacactttgataatcgcgtccgggggtgcactttcggccctgggaccaaagtggaaatcaaac

SEQ ID NO: 1347 - protein, 109 aa, Artificial Sequence
  Description of Artificial Sequence: Synthetic polypeptide
DIQMTQSPSSLSASVGDRVTITCQASQGISNDLNWYQQKPGKALKLLIYDTSNLQTGVPSRFSGSGAGTDFTLTITSLQPEDIGTYYCQHFDNRVRGCTFGPGTKVEIK

SEQ ID NO: 1348 - protein, 11 aa, Artificial Sequence
  Description of Artificial Sequence: Synthetic peptide
QHFDNRVRGCT

SEQ ID NO: 1349 - DNA, 352 bp, Artificial Sequence
  Description of Artificial Sequence: Synthetic polynucleotide
caggtgcagctggtgcagtctggggctgaggtgaagaagccggggtcctcggtgaaggtctcctgcaagacttctggaggcaccttcagtcatcatcatatcaattgggtgcggcaggcccctgggctaggacttgagtggatgggacggatcatccctgcgtttgggacagcaaactacgcacagaagttccagggcagagtcacgattaccgcggacaaatccacgagcacagccttcatggagatgaagagtctgacatctggggacacggccgtgtattactgtgccgccggggggctggtcccagttgactactggggcccgggaacgctgatcaccgtctccgcag

SEQ ID NO: 1350 - protein, 117 aa, Artificial Sequence
  Description of Artificial Sequence: Synthetic polypeptide
QVQLVQSGAEVKKPGSSVKVSCKTSGGTFSHHHINWVRQAPGLGLEWMGRIIPAFGTANYAQKFQGRVTITADKSTSTAFMEMKSLTSGDTAVYYCAAGGLVPVDYWGPGTLITVSA

SEQ ID NO: 1351 - protein, 10 aa, Artificial Sequence
  Description of Artificial Sequence: Synthetic peptide
AAGGLVPVDY

SEQ ID NO: 1352 - DNA, 337 bp, Artificial Sequence
  Description of Artificial Sequence: Synthetic polynucleotide
gatattgtgatgacccagactccactctctctgtccgtcatccctggacagccggcctccatctcctgcaagtctagtcagagcctcctgcatagggatggaaagacctatttgtattggtatctgcagaagccaggccagcctccacagctcttgatgtatgaactttccaatcggttgtctggagtgccagataggttcagtggcagcgggtcagggacagatttcacactgaaaatcagccgggtggaggctgaggatattggagtttattactgcatgcaaagtatacaacttcccctcacgttcggcggagggaccaaggtggagatcaaac

SEQ ID NO: 1353 - protein, 112 aa, Artificial Sequence
  Description of Artificial Sequence: Synthetic polypeptide
DIVMTQTPLSLSVIPGQPASISCKSSQSLLHRDGKTYLYWYLQKPGQPPQLLMYELSNRLSGVPDRFSGSGSGTDFTLKISRVEAEDIGVYYCMQSIQLPLTFGGGTKVEIK

SEQ ID NO: 1354 - protein, 9 aa, Artificial Sequence
  Description of Artificial Sequence: Synthetic peptide
MQSIQLPLT

SEQ ID NO: 1355 - DNA, 355 bp, Artificial Sequence
  Description of Artificial Sequence: Synthetic polynucleotide
caggtgcagctggtgcagtctggggctgaggtgaagaagcctgggtcctcggtgaaggtctcctgcaagacttctggaggcaccttcagcacctatgccatcaactgggtgcgacaggcccctggacaagggtttgagtggatgggagggatcatccctgtctttggtacaccaaactacgcacagaagttccagggcagagtcacgattaacgcggacgagtccacgagcacagcctacatggagttgagaagcctgagatctgaggacacggccgtatattattgtgggagagatggagggtctggggtaccggactactggggccagggaaccctggtcaccgtctcctcag

SEQ ID NO: 1356 - protein, 118 aa, Artificial Sequence
  Description of Artificial Sequence: Synthetic polypeptide
QVQLVQSGAEVKKPGSSVKVSCKTSGGTFSTYAINWVRQAPGQGFEWMGGIIPVFGTPNYAQKFQGRVTINADESTSTAYMELRSLRSEDTAVYYCGRDGGSGVPDYWGQGTLVTVSS

SEQ ID NO: 1357 - protein, 11 aa, Artificial Sequence
  Description of Artificial Sequence: Synthetic peptide
GRDGGSGVPDY

SEQ ID NO: 1358 - DNA, 321 bp, Artificial Sequence
  Description of Artificial Sequence: Synthetic polynucleotide
gacatccagatgacccagtctccatcctcactggctgcatctgtaggagacagagtcaccatcacttgtcgggcgagtcagggcattaacaattatttagcctggtttcagcagaaaccagggaaagcccctaagtccctgatctatggtgcatccaatttgcaaagtggggtcccatcaaggttcagcggcggtggatctgggacacatttcactctcaccatcagcagcctgcagcctgaagattttgcagcttattactgccagcaatataatagttacccttggacgttcggccaagggaccaaggtggaaatcaaa

SEQ ID NO: 1359 - protein, 107 aa, Artificial Sequence
  Description of Artificial Sequence: Synthetic polypeptide
DIQMTQSPSSLAASVGDRVTITCRASQGINNYLAWFQQKPGKAPKSLIYGASNLQSGVPSRFSGGGSGTHFTLTISSLQPEDFAAYYCQQYNSYPWTFGQGTKVEIK

SEQ ID NO: 1360 - protein, 9 aa, Artificial Sequence
  Description of Artificial Sequence: Synthetic peptide
QQYNSYPWT

SEQ ID NO: 1361 - DNA, 355 bp, Artificial Sequence
  Description of Artificial Sequence: Synthetic polynucleotide
caggtgcagctggtgcagtctggggctgaggtgagaaagcctgggtcctcggtgaaggtctcctgcaaggtttctggaggctccttcgacaactttgctatcatctgggtgcgacaggcccctggacaaggacttgagtggatgggagggatcatccctttctttggtacaccaaactacgcacagagattccagggcagagtcacgattaccgcggacaaatccaagagcacagtctacatggagctgagcagcctgagatctgagaacacggccgtatattactgtgcgagagcatctggttcggggagttatgactattggggccagggaaccctggtcaccgtctcctcag

SEQ ID NO: 1362 - protein, 118 aa, Artificial Sequence
  Description of Artificial Sequence: Synthetic polypeptide
QVQLVQSGAEVRKPGSSVKVSCKVSGGSFDNFAIIWVRQAPGQGLEWMGGIIPFFGTPNYAQRFQGRVTITADKSKSTVYMELSSLRSENTAVYYCARASGSGSYDYWGQGTLVTVSS

SEQ ID NO: 1363 - protein, 11 aa, Artificial Sequence
  Description of Artificial Sequence: Synthetic peptide
ARASGSGSYDY

SEQ ID NO: 1364 - DNA, 337 bp, Artificial Sequence
  Description of Artificial Sequence: Synthetic polynucleotide
gatattgtgatgactcagtctccactctccctgtccgtcacccctggagagtcggcctccatctcctgcaggtctagtcagagcctcctgcatcgtgatggaaacaattatttggattggtacctgcagaagccagggcagtctccacagctcctgatctatatgggttctaatcgggcctccggggtccctgacaggttcagtggcagtggatcaggcacagattttacactgaaaatcagcagagtggaggctgaggatgttggggtttattactgcatgcaagttgtacaaactcctgggacttttggccaggggaccaagctggagatcaaac

SEQ ID NO: 1365 - protein, 112 aa, Artificial Sequence
  Description of Artificial Sequence: Synthetic polypeptide
DIVMTQSPLSLSVTPGESASISCRSSQSLLHRDGNNYLDWYLQKPGQSPQLLIYMGSNRASGVPDRFSGSGSGTDFTLKISRVEAEDVGVYYCMQVVQTPGTFGQGTKLEIK

SEQ ID NO: 1366 - protein, 9 aa, Artificial Sequence
  Description of Artificial Sequence: Synthetic peptide
MQVVQTPGT

SEQ ID NO: 1367 - DNA, 355 bp, Artificial Sequence
  Description of Artificial Sequence: Synthetic polynucleotide
caggtgcagctggtgcagtctggggctgaggtgaagaggcctgggtcctcggtgaaggtctcctgcaagtcctctggtggcaccttcagcaattttggtatcagctgggtgcgacaggcccctggacaagggcttgagtggatgggacgaatcatccctttctttcggaccccagactacgcacagaagttccaggtcagagtcacgattaccgcggacgaatccacgagcacagtctacatggaacttagaagtctgagatttgaggacacggccgtgtatttctgtgcgaggaccggtggtttggggagttatgatgactggggccagggaaccctggtcaccgtctcctcag

SEQ ID NO: 1368 - protein, 118 aa, Artificial Sequence
  Description of Artificial Sequence: Synthetic polypeptide
QVQLVQSGAEVKRPGSSVKVSCKSSGGTFSNFGISWVRQAPGQGLEWMGRIIPFFRTPDYAQKFQVRVTITADESTSTVYMELRSLRFEDTAVYFCARTGGLGSYDDWGQGTLVTVSS

SEQ ID NO: 1369 - protein, 11 aa, Artificial Sequence
  Description of Artificial Sequence: Synthetic peptide
ARTGGLGSYDD

SEQ ID NO: 1370 - DNA, 321 bp, Artificial Sequence
  Description of Artificial Sequence: Synthetic polynucleotide
gaaattgtaatgacacagtctccagccaccctgtctttgtctccaggggaaagagccaccctcccctgcagggccagtcagagtgatacggcagctacttctcctgatacccccagaaacgaaggcaggctcccaggctcctcatctataatgcttccgccagggccactggcatcccagccaggttcagtggcagtgggtctgggacaggcttcaccctcaccatcagcagcctgcagcctgaagattttgcagtttattcctgtcagcaggattatgagtcacctcggacgttcggccaggggcccaaggtggagatca

SEQ ID NO: 1371 - protein, 107 aa, Artificial Sequence
  Description of Artificial Sequence: Synthetic polypeptide
EIVMTQSPATLSLSPGERATLPCRASQSDTAATSPDTPRNEGRLPGSSSIMLPPGPLASQPGSVAVGLGQASPSPSAACSLKILQFIPVSRIMSHLGRSARGPRWRS

SEQ ID NO: 1372 - protein, 9 aa, Artificial Sequence
  Description of Artificial Sequence: Synthetic peptide
SRIMSHLGR

SEQ ID NO: 1373 - DNA, 396 bp, Artificial Sequence
  Description of Artificial Sequence: Synthetic polynucleotide
gaggtgcagctgttggagtctgggggaggcttggtacagcctggggggtccctgagactctcctgtgcagcctctggattcacctttagtagctctgccatgagctgggtccgccaggctccagggaaggggctggagtgggtctcatctatgagtggtagtgatgataccacatacttcgcagactccgtgaagggccggttcaccatctccagagacaattccgagagcacactgtatctgcaaatgaacagcctgagagccgaggacacggccgtatactactgtgcgagattgaattattattatgatactagtggctattactctggtcctcctttctacttctactacatggacgtctggggcaaagggaccacggtcaccgtctcctca

SEQ ID NO: 1374 - protein, 132 aa, Artificial Sequence; identical to SEQ ID NO: 81
  Description of Artificial Sequence: Synthetic polypeptide

SEQ ID NO: 1375 - protein, 25 aa, Artificial Sequence
  Description of Artificial Sequence: Synthetic peptide
ARLNYYYDTSGYYSGPPFYFYYMDV

SEQ ID NO: 1376 - DNA, 322 bp, Artificial Sequence; identical to SEQ ID NO: 200
  Description of Artificial Sequence: Synthetic polynucleotide

SEQ ID NO: 1377 - protein, 107 aa, Artificial Sequence; identical to SEQ ID NO: 82
  Description of Artificial Sequence: Synthetic polypeptide

SEQ ID NO: 1378 - protein, 9 aa, Artificial Sequence
  Description of Artificial Sequence: Synthetic peptide
QQFISYPYT

SEQ ID NO: 1379 - DNA, 364 bp, Artificial Sequence
  Description of Artificial Sequence: Synthetic polynucleotide
caggtgcagctggtggagtctgggggaggcgtggtccagcctgggaggtccctgagactctcctgtgcagcctctggatttagtttcggcagttatgctatgcactgggtccgccaggctccaggcaaggggctggagtgggtggcagttatatcaaatgatggaagtcaaaaagaatatggagcctccgtgaggggccggttcaccatctccagggacaactccaagaaaacactgtatctgcacttgaacagcctgagacctgaggacacggctgtatattactgtgcgaaagatgcctccgggtgggtagacaactggttcgaattttggggccagggaaccctagtcaccgtctcctcag

SEQ ID NO: 1380 - protein, 121 aa, Artificial Sequence
  Description of Artificial Sequence: Synthetic polypeptide
QVQLVESGGGVVQPGRSLRLSCAASGFSFGSYAMHWVRQAPGKGLEWVAVISNDGSQKEYGASVRGRFTISRDNSKKTLYLHLNSLRPEDTAVYYCAKDASGWVDNWFEFWGQGTLVTVSS

SEQ ID NO: 1381 - protein, 14 aa, Artificial Sequence
  Description of Artificial Sequence: Synthetic peptide
AKDASGWVDNWFEF

SEQ ID NO: 1382 - DNA, 322 bp, Artificial Sequence
  Description of Artificial Sequence: Synthetic polynucleotide
gaaatagtgatgacgcagtctccagccaccctgtctgtgtctccaggaaatagagtgaccctctcctgcagggccagtcagagtgtcggtaccaacttagcctggtaccagcagaaacctggccaggctcccaggctcctcatctatggtgcctccaccagggccactggtctcccagccaggttcagtggcagtgggtctgggacagagttcactctcaccatcagcagcctgcagtctggagattttggagtttattattgtcagcagtatgatttctggccgctcactttcggcggagggaccaaggtggacatcaaac

SEQ ID NO: 1383 - protein, 107 aa, Artificial Sequence
  Description of Artificial Sequence: Synthetic polypeptide
EIVMTQSPATLSVSPGNRVTLSCRASQSVGTNLAWYQQKPGQAPRLLIYGASTRATGLPARFSGSGSGTEFTLTISSLQSGDFGVYYCQQYDFWPLTFGGGTKVDIK

SEQ ID NO: 1384 - protein, 9 aa, Artificial Sequence
  Description of Artificial Sequence: Synthetic peptide
QQYDFWPLT

SEQ ID NO: 1385 - DNA, 363 bp, Artificial Sequence
  Description of Artificial Sequence: Synthetic polynucleotide
gaggtgcagctggtggagtctgggggaggcctggtcaagccgggggggtccctgagactctcctgtgcagcctctggattcgccttcagaagttttggcatgaactgggtccgccagcctccagggaaggggctggagtgggtcgcatccattggcagtaggagtgattatatatactatgcagactcagtgaagggccgattcaccatctccagagacgacgccaagaactcactgtatctgcaaatgaacaccctgagagccgaggacacggctgtgtattattgtacgaaagatctcatgggggtggattggttcggcatggacgtctggggccaagggaccacggtcaccgtctcctca

SEQ ID NO: 1386 - protein, 121 aa, Artificial Sequence
  Description of Artificial Sequence: Synthetic polypeptide
EVQLVESGGGLVKPGGSLRLSCAASGFAFRSFGMNWVRQPPGKGLEWVASIGSRSDYIYYADSVKGRFTISRDDAKNSLYLQMNTLRAEDTAVYYCTKDLMGVDWFGMDVWGQGTTVTVSS

SEQ ID NO: 1387 - protein, 14 aa, Artificial Sequence
  Description of Artificial Sequence: Synthetic peptide
TKDLMGVDWFGMDV

SEQ ID NO: 1388 - DNA, 322 bp, Artificial Sequence
  Description of Artificial Sequence: Synthetic polynucleotide
gaaattgtgttgacacagtctccagccaccctgtctttgtctccaggggaaagagccaccctctcctgccgggccagtcagagtgtcaccagctacttagcctggtaccaacagagacctggacagactcccaggctcctcatctatgatgcatctaccagggccactggcatcccagccaggttcagtggcagtgggtctgggacagacttcactctcaccatcagcagcctggagcctgaagatcttgcagtttattactgtcagcagcgtaccagctggcctccgacgttcggcggagggaccaaggtagagatcaaac

SEQ ID NO: 1389 - protein, 107 aa, Artificial Sequence
  Description of Artificial Sequence: Synthetic polypeptide
EIVLTQSPATLSLSPGERATLSCRASQSVTSYLAWYQQRPGQTPRLLIYDASTRATGIPARFSGSGSGTDFTLTISSLEPEDLAVYYCQQRTSWPPTFGGGTKVEIK

SEQ ID NO: 1390 - protein, 9 aa, Artificial Sequence
  Description of Artificial Sequence: Synthetic peptide
QQRTSWPPT

SEQ ID NO: 1391 - DNA, 358 bp, Artificial Sequence
  Description of Artificial Sequence: Synthetic polynucleotide
caggtgcagctggtgcagtctggggctgaggtgaagaagcctgggtcctcggtgaaggtctcctgcaaggcttctggaggcaatttcaacaattatgctatcaactgggtgcgacaggcccctggacaagggcttgagtggatgggagggatcatccctatctttggaacaccgaactacgcacagaagttccagggcagagtcacgatcagcgcggacaaatccacgatgacagcctacatggaagtgaccagcctgagatctgaggacacggccgtgtactactgtgcgagagattccggcagctctcccagttttgactactggggccagggaaccctggtcaccgtctcctcag

SEQ ID NO: 1392 - protein, 119 aa, Artificial Sequence
  Description of Artificial Sequence: Synthetic polypeptide
QVQLVQSGAEVKKPGSSVKVSCKASGGNFNNYAINWVRQAPGQGLEWMGGIIPIFGTPNYAQKFQGRVTISADKSTMTAYMEVTSLRSEDTAVYYCARDSGSSPSFDYWGQGTLVTVSS

SEQ ID NO: 1393 - protein, 12 aa, Artificial Sequence
  Description of Artificial Sequence: Synthetic peptide
ARDSGSSPSFDY

SEQ ID NO: 1394 - DNA, 334 bp, Artificial Sequence
  Description of Artificial Sequence: Synthetic polynucleotide
gatattgtgatgactcagtctccactctccctgtccgtcacccctggagagccggcctccatctcctgcaggtctagtcagagcctcctgcacagtactggatacacctatttggattggtacctgcagaagccagggcagtctccacaactcctgatctatttgggttctactcgggcctccgggatccctgacaggttcagtggcagtggatcgggcacagattttacactgaaaatcagcagagtggaggctgaggatgttggggtttattactgcatgcaagctctacaaagtttcaccttcggccaagggacacgactggagattaaac

SEQ ID NO: 1395 - protein, 111 aa, Artificial Sequence
  Description of Artificial Sequence: Synthetic polypeptide
DIVMTQSPLSLSVTPGEPASISCRSSQSLLHSTGYTYLDWYLQKPGQSPQLLIYLGSTRASGIPDRFSGSGSGTDFTLKISRVEAEDVGVYYCMQALQSFTFGQGTRLEIK

SEQ ID NO: 1396 - protein, 8 aa, Artificial Sequence
  Description of Artificial Sequence: Synthetic peptide
MQALQSFT

SEQ ID NO: 1397 - DNA, 384 bp, Artificial Sequence
  Description of Artificial Sequence: Synthetic polynucleotide
gaggtgcagctgttggagtctgggggaaacttggtgcagcctggggggtccctgagactctcctgtacagtctctggactcaactttaacatctatcccatgacgtgggtccgccaggctccagggaaggggctggagtgggtctcatttattagtgctagtggtgctaccacatactacgcagactccgtgaagggccggttcgccatctccagggacaattacaagagcactctgtatctgcaaatgaacagcctcagagccgaagacacggccgtctattactgtgcgaatggctatcaggcatatagtagtggctgggggagcgactactattacggtatggacgactggggccaagggaccacggtcaccgtctcctca

SEQ ID NO: 1398 - protein, 128 aa, Artificial Sequence
  Description of Artificial Sequence: Synthetic polypeptide
EVQLLESGGNLVQPGGSLRLSCTVSGLNFNIYPMTWVRQAPGKGLEWVSFISASGATTYYADSVKGRFAISRDNYKSTLYLQMNSLRAEDTAVYYCANGYQAYSSGWGSDYYYGMDDWGQGTTVTVSS

SEQ ID NO: 1399 - protein, 21 aa, Artificial Sequence
  Description of Artificial Sequence: Synthetic peptide
ANGYQAYSSGWGSDYYYGMDD

SEQ ID NO: 1400 - DNA, 328 bp, Artificial Sequence
  Description of Artificial Sequence: Synthetic polynucleotide
gaaattgtgttgacgcagtctccaggcaccctgtctttgtctccaggagaaagagccaccctctcctgtagggccagtcagagtgttggcagcgactacttagcctggttccagcagaaacctggccagtctccccgactcctcatctatggtgcatccaacagggccactgacatcccagacaggttcagtggcagtgggtctgggacagacttcactctcaccatcagcagactggagcctgaagattttgcagtgtattactgtcagcagtatgggagctcacctccgtacatttttggccaggggaccaagctggagatcaaac

SEQ ID NO: 1401 - protein, 109 aa, Artificial Sequence
  Description of Artificial Sequence: Synthetic polypeptide
EIVLTQSPGTLSLSPGERATLSCRASQSVGSDYLAWFQQKPGQSPRLLIYGASNRATDIPDRFSGSGSGTDFTLTISRLEPEDFAVYYCQQYGSSPPYIFGQGTKLEIK

SEQ ID NO: 1402 - protein, 10 aa, Artificial Sequence
  Description of Artificial Sequence: Synthetic peptide
QQYGSSPPYI

SEQ ID NO: 1403 - DNA, 355 bp, Artificial Sequence
  Description of Artificial Sequence: Synthetic polynucleotide
caggtccagctggtgcagtctggggctgaagtgaagaagcctgggtcctcggtgaaggtctcctgcaaggcttctggaggcaccttcagtaactttgctatcagctgggtgcgacaggcccctggacaagggcttgagtggatgggagatatcatccctgtctttgctacaccaaggtacgcacaggagttccagggcagagtcacgattaccgcggacaagtccacgagcacagcctacatggaggtgaacagcctgagatctgaggacacggccgtgtattactgtacgagagaggatggtttggggagttattatgattggggccagggaaccctggtcaccgtctcctcag

SEQ ID NO: 1404 - protein, 118 aa, Artificial Sequence
  Description of Artificial Sequence: Synthetic polypeptide
QVQLVQSGAEVKKPGSSVKVSCKASGGTFSNFAISWVRQAPGQGLEWMGDIIPVFATPRYAQEFQGRVTITADKSTSTAYMEVNSLRSEDTAVYYCTREDGLGSYYDWGQGTLVTVSS

SEQ ID NO: 1405 - protein, 11 aa, Artificial Sequence
  Description of Artificial Sequence: Synthetic peptide
TREDGLGSYYD

SEQ ID NO: 1406 - DNA, 337 bp, Artificial Sequence
  Description of Artificial Sequence: Synthetic polynucleotide
gatattgtgatgactcagtctccactctccctgcccgtcacccctggagagccggcctccatctcctgcaggtctagtcagagcctcctgcataggaatgggcacaactatttggattggtacctgcagaagccagggcagtctccacagctcctgatctatttgggttctaatcgggcctctggggtccctgacaggttcagtggcagtggatcaggcacagattttacactgaaaatcagcagagtggaggctgaggatgttggggtctattactgcatggaagctctacaaactcctcggacttttggccaggggactaagctggagatcaaac

SEQ ID NO: 1407 - protein, 112 aa, Artificial Sequence
  Description of Artificial Sequence: Synthetic polypeptide
DIVMTQSPLSLPVTPGEPASISCRSSQSLLHRNGHNYLDWYLQKPGQSPQLLIYLGSNRASGVPDRFSGSGSGTDFTLKISRVEAEDVGVYYCMEALQTPRTFGQGTKLEIK

SEQ ID NO: 1408 - protein, 9 aa, Artificial Sequence
  Description of Artificial Sequence: Synthetic peptide
MEALQTPRT

SEQ ID NO: 1409 - DNA, 370 bp, Artificial Sequence
  Description of Artificial Sequence: Synthetic polynucleotide
caggtgcagctgcaggagtcgggcccaggactggtgaagccttcggggaccctgtccctcacctgcgctgtctctggtggctccatcagcagtaataactggtggagttgggtccgccagaccccagggaaggggctggagtggattggggaaatctatcatactgggagcaccaactacagtccgtccctcaagagtcgagtcaccatgtcggtagacaagtccaagaaccagttctccctgaagctagtctctgtgaccgccgcggacacggccgtctatttctgtgcaagatcgttcgatttttggattaattattattcatactttgactcctggggccagggaaccctggtcaccgtctcctcag

SEQ ID NO: 1410 - protein, 123 aa, Artificial Sequence
  Description of Artificial Sequence: Synthetic polypeptide
QVQLQESGPGLVKPSGTLSLTCAVSGGSISSNNWWSWVRQTPGKGLEWIGEIYHTGSTNYSPSLKSRVTMSVDKSKNQFSLKLVSVTAADTAVYFCARSFDFWINYYSYFDSWGQGTLVTVSS

SEQ ID NO: 1411 - protein, 16 aa, Artificial Sequence
  Description of Artificial Sequence: Synthetic peptide
ARSFDFWINYYSYFDS

SEQ ID NO: 1412 - DNA, 322 bp, Artificial Sequence
  Description of Artificial Sequence: Synthetic polynucleotide
gaaattgtgttgacacagtctccagccaccctgtctttgtctccaggggaaagagccaccctctcctgcagggccagtcagagtgttagcggctacttagcctggtaccaacagaaacctggccaggctcccaggctcctcatctatgaggcatccaagagggccactggcatcccagccaggttcagtggcagtgggtctgggacagacttcactctcagcatcagcagcctacagcctgaagatcttgcagtttattactgtcagcaccgtagcaatcaaggattcactttcggccctgggaccaaagtggatatcaaac

SEQ ID NO: 1413 - protein, 107 aa, Artificial Sequence
  Description of Artificial Sequence: Synthetic polypeptide
EIVLTQSPATLSLSPGERATLSCRASQSVSGYLAWYQQKPGQAPRLLIYEASKRATGIPARFSGSGSGTDFTLSISSLQPEDLAVYYCQHRSNQGFTFGPGTKVDIK

SEQ ID NO: 1414 - protein, 9 aa, Artificial Sequence
  Description of Artificial Sequence: Synthetic peptide
QHRSNQGFT

SEQ ID NO: 1415 - DNA, 349 bp, Artificial Sequence
  Description of Artificial Sequence: Synthetic polynucleotide
caggtgcagctggtgcagtctggggctgaagtgaagaagcctgggtcctcggtgaaggtctcctgcaaggcttctggaggcaccttcaacaactatgtcatcagctgggtgcgacaggcccctggacaagggcttgagtggatgggaggaatcctccctacttttgacacaacaaactacgcacagaagttccacggcagactcacgataaccgcggacaaatccacgagcacagcctacatggagctgagcagtttgaaatctgaggacacggccttatattattgtgcgaccggatacagttatggcgaccactggggccagggaaccctggtcaccgtctcctcag

SEQ ID NO: 1416 - protein, 116 aa, Artificial Sequence
  Description of Artificial Sequence: Synthetic polypeptide
QVQLVQSGAEVKKPGSSVKVSCKASGGTFNNYVISWVRQAPGQGLEWMGGILPTFDTTNYAQKFHGRLTITADKSTSTAYMELSSLKSEDTALYYCATGYSYGDHWGQGTLVTVSS

SEQ ID NO: 1417 - protein, 9 aa, Artificial Sequence
  Description of Artificial Sequence: Synthetic peptide
ATGYSYGDH

SEQ ID NO: 1418 - DNA, 325 bp, Artificial Sequence
  Description of Artificial Sequence: Synthetic polynucleotide
gacatccagatgacccagtctccatcctccctgtctgcatctgtaggagacagagtcaccattacttgccaggcgagtcaggacattagcaaccatttaaattggtatcagcagaaaccagggaaagcccctaagctcctgatctacgatgcatccaatttggaaactggggtcccatcaaggttcagtggaagtggatctgggacagattttactttcaccatcagcagcctgcagcctgaagatattgcaacatattactgtcaacagtttgataatctcccctctagtacttttggccaggggaccaagctagagatcaaac

SEQ ID NO: 1419 - protein, 108 aa, Artificial Sequence
  Description of Artificial Sequence: Synthetic polypeptide
DIQMTQSPSSLSASVGDRVTITCQASQDISNHLNWYQQKPGKAPKLLIYDASNLETGVPSRFSGSGSGTDFTFTISSLQPEDIATYYCQQFDNLPSSTFGQGTKLEIK

SEQ ID NO: 1420 - protein, 10 aa, Artificial Sequence
  Description of Artificial Sequence: Synthetic peptide
QQFDNLPSST

SEQ ID NO: 1421 - DNA, 346 bp, Artificial Sequence
  Description of Artificial Sequence: Synthetic polynucleotide
caggtccagctggtgcagtctggggctgaggtgaagaagcctgggtcctcggtgaaggtctcctgcaaggcctctggaggcaccttcaacaactatggtatccactgggtgcgacaggcccctggacaagggcttgagtggatgggagggatcatccctgtctttggtacagcaaacttcgcacagaagttccagggcagagtcacgattaccgcggacatatccacgagcacagtttacatgcagctgaccagcctgagatctgaggacacggccgtgtatttctgtgcgagagacaactttggttattactggggccagggaaccctggtcaccgtgtcctcag

SEQ ID NO: 1422 - protein, 115 aa, Artificial Sequence
  Description of Artificial Sequence: Synthetic polypeptide
QVQLVQSGAEVKKPGSSVKVSCKASGGTFNNYGIHWVRQAPGQGLEWMGGIIPVFGTANFAQKFQGRVTITADISTSTVYMQLTSLRSEDTAVYFCARDNFGYYWGQGTLVTVSS

SEQ ID NO: 1423 - protein, 8 aa, Artificial Sequence
  Description of Artificial Sequence: Synthetic peptide
ARDNFGYY

SEQ ID NO: 1424 - DNA, 322 bp, Artificial Sequence
  Description of Artificial Sequence: Synthetic polynucleotide
gacatccagatgacccagtctccatcctccctgtctgcatctgtaggagacagagtcatcatcacttgccaggcgagtcaggacattagcaagtatttaaattggtatcagcaaaaatcagggaaagcccctcagctcctgatctacgatgcatccaatttggaaacaggggtcccatcaaggttcagtggaagtggatctgggagagattttactctcaccatcagcagcctgcagcctgaagatattgcaacatattactgtcaacaatatgaaaatctccggagcacgttcggcggagggaccaaggtggagatcaaac

SEQ ID NO: 1425 - protein, 107 aa, Artificial Sequence
  Description of Artificial Sequence: Synthetic polypeptide
DIQMTQSPSSLSASVGDRVIITCQASQDISKYLNWYQQKSGKAPQLLIYDASNLETGVPSRFSGSGSGRDFTLTISSLQPEDIATYYCQQYENLRSTFGGGTKVEIK

SEQ ID NO: 1426 - protein, 9 aa, Artificial Sequence
  Description of Artificial Sequence: Synthetic peptide
QQYENLRST

SEQ ID NO: 1427 - DNA, 349 bp, Artificial Sequence
  Description of Artificial Sequence: Synthetic polynucleotide
caggtgcagctggtgcagtctgggcctgaggtgaagaagcctgggtcgtcggtgaaggtctcctgcaaggcttctggaggcaccttcaacacacattctatcaactgggtgcgacaggcccctggacaagggcttgagtggatgggggggatcatccctgtctttggtacaccaaactacgcacagaagttccagggcagagtcacgattaccgcggacaaatccacgagcacagtctacatggaagtgaggagcctgagaattgaggacacggccgtgtattactgtgcgagagacaactgggggttcgacccctggggccagggaaccctggtcaccgtttcctcag

SEQ ID NO: 1428 - protein, 116 aa, Artificial Sequence
  Description of Artificial Sequence: Synthetic polypeptide
QVQLVQSGPEVKKPGSSVKVSCKASGGTFNTHSINWVRQAPGQGLEWMGGIIPVFGTPNYAQKFQGRVTITADKSTSTVYMEVRSLRIEDTAVYYCARDNWGFDPWGQGTLVTVSS

SEQ ID NO: 1429 - protein, 9 aa, Artificial Sequence
  Description of Artificial Sequence: Synthetic peptide
ARDNWGFDP

SEQ ID NO: 1430 - DNA, 322 bp, Artificial Sequence
  Description of Artificial Sequence: Synthetic polynucleotide
gaaattgtgttgacgcagtctccaggcaccctgtctttgtctccaggggaaagagccaccctctcctgcagggccagtcagagtgttagcagcgattacttagcctggtaccagcagaaacctggccaggctcccaggctcctcatctatggtgcttccaccagggccactggcatcccagacaggttcagtggcagtgggtctgggacagacttcactctcaccatcagcagactggagcctgaagattttgcagtgtattactgtcagcagtctggtagctctaaggccttcggccaagggacacgactggagattaaac

SEQ ID NO: 1431 - protein, 107 aa, Artificial Sequence
  Description of Artificial Sequence: Synthetic polypeptide
EIVLTQSPGTLSLSPGERATLSCRASQSVSSDYLAWYQQKPGQAPRLLIYGASTRATGIPDRFSGSGSGTDFTLTISRLEPEDFAVYYCQQSGSSKAFGQGTRLEIK

SEQ ID NO: 1432 - protein, 8 aa, Artificial Sequence
  Description of Artificial Sequence: Synthetic peptide
QQSGSSKA

SEQ ID NO: 1433 - DNA, 375 bp, Artificial Sequence
  Description of Artificial Sequence: Synthetic polynucleotide
gaggtgcagctgttggagtctgggggaggcttggtacagccgggggggtccctgagattctcctgtgcagcctctggattcacctttagcaactatgccatgagctgggtccgccaggctcccgggaatgggctggagtgggtctctgctattagtgctggtggtggtatcacatattacgcagactccgtgaggggccggttcaccatctccagagacaattccaagaacacgctgtttctacaaatgaacagcctgagagccgaggacacggccgtatattattgtgcgaaagatctaggttattggagtggtcaccaaccgggggactacatggacgtctggggcaaagggaccacggtcaccgtctcctca

SEQ ID NO: 1434 - protein, 125 aa, Artificial Sequence
  Description of Artificial Sequence: Synthetic polypeptide
EVQLLESGGGLVQPGGSLRFSCAASGFTFSNYAMSWVRQAPGNGLEWVSAISAGGGITYYADSVRGRFTISRDNSKNTLFLQMNSLRAEDTAVYYCAKDLGYWSGHQPGDYMDVWGKGTTVTVSS

SEQ ID NO: 1435 - protein, 18 aa, Artificial Sequence
  Description of Artificial Sequence: Synthetic peptide
AKDLGYWSGHQPGDYMDV

SEQ ID NO: 1436 - DNA, 322 bp, Artificial Sequence
  Description of Artificial Sequence: Synthetic polynucleotide
gaaattgtgttgacacagtctccagccaccctgtctgtgtctccaggggaaagagccaccctctcctgcagggccagtcagagtgttagcagctacttagcctggtaccaacagagacctggccaggctcccaggctcctcatctatgaagcatccatcagggccactggcatcccagccaggttcagtggcagtgggtctgggacagacttcatcctcaccatcagcagcctagagcctgaagattttgcagtttattactgtcagcagcgtagccactggccactcactttcggccccgggaccaaagtggatgtcaaac

SEQ ID NO: 1437 - protein, 107 aa, Artificial Sequence
  Description of Artificial Sequence: Synthetic polypeptide
EIVLTQSPATLSVSPGERATLSCRASQSVSSYLAWYQQRPGQAPRLLIYEASIRATGIPARFSGSGSGTDFILTISSLEPEDFAVYYCQQRSHWPLTFGPGTKVDVK

SEQ ID NO: 1438 - protein, 9 aa, Artificial Sequence
  Description of Artificial Sequence: Synthetic peptide
QQRSHWPLT

SEQ ID NO: 1439 - DNA, 357 bp, Artificial Sequence
  Description of Artificial Sequence: Synthetic polynucleotide
gaggtgcagctggtggagtctgggggaggcttggtacaacctggggggtccctgagactctcctgtgcagcctctggattcactctcagtagttatgccatgacctgggtccgccaggctccagggaaggggctagaatgggtttcatacattagtgatactggtagtgtcacatattccgcagactctctgacgggccgattcaccatctccagagacaacgccaagaattcactgtatctgcaaatgaacagcctgagagtcgaggacacggctgtgtattactgtgcgagtctgaggggtggctatgcctacatggacgtctggggcagagggaccacggtcaccgtctcctca

SEQ ID NO: 1440 - protein, 119 aa, Artificial Sequence
  Description of Artificial Sequence: Synthetic polypeptide
EVQLVESGGGLVQPGGSLRLSCAASGFTLSSYAMTWVRQAPGKGLEWVSYISDTGSVTYSADSLTGRFTISRDNAKNSLYLQMNSLRVEDTAVYYCASLRGGYAYMDVWGRGTTVTVSS

SEQ ID NO: 1441 - protein, 12 aa, Artificial Sequence
  Description of Artificial Sequence: Synthetic peptide
ASLRGGYAYMDV

SEQ ID NO: 1442 - DNA, 325 bp, Artificial Sequence
  Description of Artificial Sequence: Synthetic polynucleotide
gacatccagatgacccagtctccttccaccctgtctgcctcagtaggagacagagtcaccatcacttgccgggccagtgagagtataagatcctggttggcctggtatcagcagaaaccagggaaaccccctaagctcctgatctataaggcgtccattttagagggtggagtcccatcaagattcagcggcagtggatctgagacaaaattcactctcaccatcagcagcctgcagcctgatgattttgcaacttattactgccaacagtataatactttttctcgaatcaccttcggccaagggacacgactggagattaaac

SEQ ID NO: 1443 - protein, 108 aa, Artificial Sequence
  Description of Artificial Sequence: Synthetic polypeptide
DIQMTQSPSTLSASVGDRVTITCRASESIRSWLAWYQQKPGKPPKLLIYKASILEGGVPSRFSGSGSETKFTLTISSLQPDDFATYYCQQYNTFSRITFGQGTRLEIK

SEQ ID NO: 1444 - protein, 10 aa, Artificial Sequence
  Description of Artificial Sequence: Synthetic peptide
QQYNTFSRIT

SEQ ID NO: 1445 - DNA, 399 bp, Artificial Sequence
  Description of Artificial Sequence: Synthetic polynucleotide
gaggtgcagctggtggagtctgggggaggcttggtacagcctggggggtccctgagactctcctgtgcagcctctggattcaccctcagtaaccatggcatgacctgggtccgccaggctccagggatggggctggagtggatttcatacattagtgatagtggtgatctcatttacgacgcagactctgtgaagggccgattcaccgtctccagagacaacgccaagaactcactctatctgcaattgaacagcctgagagccgaggacacggctgtctattactgtgcgagagaggtttggaagtcatctcaaatcgcccctaataactggcacgatccttactactactattacatggacgtctggggcaaagggaccgcggtcaccgtctcctca

SEQ ID NO: 1446 - protein, 133 aa, Artificial Sequence
  Description of Artificial Sequence: Synthetic polypeptide
EVQLVESGGGLVQPGGSLRLSCAASGFTLSNHGMTWVRQAPGMGLEWISYISDSGDLIYDADSVKGRFTVSRDNAKNSLYLQLNSLRAEDTAVYYCAREVWKSSQIAPNNWHDPYYYYYMDVWGKGTAVTVSS

SEQ ID NO: 1447 - protein, 26 aa, Artificial Sequence
  Description of Artificial Sequence: Synthetic peptide
AREVWKSSQIAPNNWHDPYYYYYMDV

SEQ ID NO: 1448 - DNA, 325 bp, Artificial Sequence
  Description of Artificial Sequence: Synthetic polynucleotide
gacatccagatgacccagtctccatcctccctgtctgcatctgtaggagacagagtcaccatcacttgccgggcaagtcagaccattaccaactatttaaattggtatcagcagaaaccagggaaagtccctgagctcctgatttatgctgcatccaatttacatagtggggtcccatcaaggttcagtggcagtggatctgggacagatttcactctcaccatcaacagtctgcaacctgaggatgtcgcgacttactactgtcaacagagttacagtacccctcggttcactttcggccctgggaccaaggtggaaatcaaac

SEQ ID NO: 1449 - protein, 108 aa, Artificial Sequence
  Description of Artificial Sequence: Synthetic polypeptide
DIQMTQSPSSLSASVGDRVTITCRASQTITNYLNWYQQKPGKVPELLIYAASNLHSGVPSRFSGSGSGTDFTLTINSLQPEDVATYYCQQSYSTPRFTFGPGTKVEIK

SEQ ID NO: 1450 - protein, 10 aa, Artificial Sequence
  Description of Artificial Sequence: Synthetic peptide
QQSYSTPRFT

SEQ ID NO: 1451 - DNA, 373 bp, Artificial Sequence
  Description of Artificial Sequence: Synthetic polynucleotide
gaggtgcagctgttggagtctgggggaggcttggtacagccgggggggtccctgacactctcctgtacagcctctggattcaccttcagtagcaatgccatgagttgggtccgccaggctccagggaaggggctggagtgggtctcagttattagtgctgatggtggtatcacatacgacgcagactccgtgaagggccggtttaccatctcaagagacaattccaaggacacgctatatctccaaatgaaccgcctgagagccgaggacacggccgtatattactgtgtgaaagattacaattattggagtgtttattccaactactactttgactactggggccagggaaccctggtcaccgtctcctcag

SEQ ID NO: 1452 - protein, 124 aa, Artificial Sequence
  Description of Artificial Sequence: Synthetic polypeptide
EVQLLESGGGLVQPGGSLTLSCTASGFTFSSNAMSWVRQAPGKGLEWVSVISADGGITYDADSVKGRFTISRDNSKDTLYLQMNRLRAEDTAVYYCVKDYNYWSVYSNYYFDYWGQGTLVTVSS

SEQ ID NO: 1453 - protein, 17 aa, Artificial Sequence
  Description of Artificial Sequence: Synthetic peptide
VKDYNYWSVYSNYYFDY

SEQ ID NO: 1454 - DNA, 322 bp, Artificial Sequence
  Description of Artificial Sequence: Synthetic polynucleotide
gaaattgtgttgacacagtctccagccaccctgtctttgtctccgggggacagagccaccctctcctgcagggccagtcagagtgttaccagctacttagcctggtaccaacaaaaacctggccaggctcccaggctcctcatctttgaggcgtccatcagggccactggcatcccagccaggttcagtggcagtgggtctgggacagacttcactctcaccatcagcggcctagagcctgaagattttgcagtttattactgtcaacagtgtagcagctggcctccctccttcggccaagggacacgactggatattgaac

SEQ ID NO: 1455 - protein, 107 aa, Artificial Sequence
  Description of Artificial Sequence: Synthetic polypeptide
EIVLTQSPATLSLSPGDRATLSCRASQSVTSYLAWYQQKPGQAPRLLIFEASIRATGIPARFSGSGSGTDFTLTISGLEPEDFAVYYCQQCSSWPPSFGQGTRLDIE

SEQ ID NO: 1456 - protein, 9 aa, Artificial Sequence
  Description of Artificial Sequence: Synthetic peptide
QQCSSWPPS

SEQ ID NO: 1457 - DNA, 379 bp, Artificial Sequence
  Description of Artificial Sequence: Synthetic polynucleotide
gaggtgcagctgttggagtctgggggaggcttggttcagcctggggggtccctgagcctctcctgttcagcctctgaattcaccttcaacacctatgccatgaactgggtccgccaggctccagggaaggggctggagtgggtcgcatctattagtggaagtggctctagtggatactacgcagactccgtgaagggccggttcaccatttccagagacaattcgaggagcaccctatatctgcgaatgaacaacctgagagccgacgacacggccgtatattattgtgcgaaggagaggtcggactacggtgactacggggcaccccctgacgtttttgatatctggggccaagggtccatggtcaccgtctcttcag

SEQ ID NO: 1458 - protein, 126 aa, Artificial Sequence
  Description of Artificial Sequence: Synthetic polypeptide
EVQLLESGGGLVQPGGSLSLSCSASEFTFNTYAMNWVRQAPGKGLEWVASISGSGSSGYYADSVKGRFTISRDNSRSTLYLRMNNLRADDTAVYYCAKERSDYGDYGAPPDVFDIWGQGSMVTVSS

SEQ ID NO: 1459 - protein, 19 aa, Artificial Sequence
  Description of Artificial Sequence: Synthetic peptide
AKERSDYGDYGAPPDVFDI

SEQ ID NO: 1460 - DNA, 322 bp, Artificial Sequence
  Description of Artificial Sequence: Synthetic polynucleotide
gacatccagatgacccagtctccttccaccctgtctgcatctgtaggagacagagtcaccctcacttgccgggccagtcagaatattgataactggttggcctggtatcagcagaaaccagggaaagcccctaaggtcctgatctataaggcgtctaatttagagaatggggtcccatcgaggttcagcggccgtggatctgggacagaattcactctcaccatcaccaacctgcagcctgatgattttgcaacttattactgccaacagtattacagttacctgtacagttttggccaggggaccaaactggagatcaaac

SEQ ID NO: 1461 - protein, 107 aa, Artificial Sequence
  Description of Artificial Sequence: Synthetic polypeptide
DIQMTQSPSTLSASVGDRVTLTCRASQNIDNWLAWYQQKPGKAPKVLIYKASNLENGVPSRFSGRGSGTEFTLTITNLQPDDFATYYCQQYYSYLYSFGQGTKLEIK

SEQ ID NO: 1462 - protein, 9 aa, Artificial Sequence
  Description of Artificial Sequence: Synthetic peptide
QQYYSYLYS

SEQ ID NO: 1463 - DNA, 355 bp, Artificial Sequence
  Description of Artificial Sequence: Synthetic polynucleotide
caggtgcagctggtgcagtctggggctgaggtgaagaagcctgggtcctcggtgacggtctcctgcaagacttccggaggcgccttcagcaactatgctatcacctgggtgcgacaggcccctggacaagggcttgagtggatgggagacatcatccctttctttggtacagcaaactacgcacagaagttcaagggcagagtcaccattaccgcggacgcatccacgagtacagcctacatgcagctgagcagcctgagatctgaggacacggccgtgtattactgtgcgagagatggtggatacagtcatggggactactggggccagggaaccctggtcaccgtctcctcag

SEQ ID NO: 1464 - protein, 118 aa, Artificial Sequence
  Description of Artificial Sequence: Synthetic polypeptide
QVQLVQSGAEVKKPGSSVTVSCKTSGGAFSNYAITWVRQAPGQGLEWMGDIIPFFGTANYAQKFKGRVTITADASTSTAYMQLSSLRSEDTAVYYCARDGGYSHGDYWGQGTLVTVSS

SEQ ID NO: 1465 - protein, 11 aa, Artificial Sequence
  Description of Artificial Sequence: Synthetic peptide
ARDGGYSHGDY

SEQ ID NO: 1466 - DNA, 322 bp, Artificial Sequence
  Description of Artificial Sequence: Synthetic polynucleotide
gacatccagatgacccagtctccatcctccctgtctgcatctgtaggagccagagtcaccatcacttgccaggcgagtcaggacatcaagaactatttaaattggtatcagcagaaaccaggaaaagcccctaacctcctgatctacgaggcatccaacttgcaaacaggggtcccatcaaggttcagtggaagtggatctgggacaaattttatttttaccatcagcagcctgcagcctgaagacattgcaacatattactgtcaacagtatgataatcgccctcgaacttttggccaggggaccaggctggagatcaaac

SEQ ID NO: 1467 - protein, 107 aa, Artificial Sequence
  Description of Artificial Sequence: Synthetic polypeptide
DIQMTQSPSSLSASVGARVTITCQASQDIKNYLNWYQQKPGKAPNLLIYEASNLQTGVPSRFSGSGSGTNFIFTISSLQPEDIATYYCQQYDNRPRTFGQGTRLEIK

SEQ ID NO: 1468 - protein, 9 aa, Artificial Sequence
  Description of Artificial Sequence: Synthetic peptide
QQYDNRPRT

SEQ ID NO: 1469 - DNA, 355 bp, Artificial Sequence
  Description of Artificial Sequence: Synthetic polynucleotide
caggtgcagctggtgcagtctggggctgaggtgaagaagcctgggtcctcggtgaaggtctcctgcaaggcttctggatactccttcaacaactttgctatcaactgggtgcggcaggcccctggacaagggcttgagtggatgggacggatcacccctttttttggcacatcagacaacgcacagaagttccagggcagagtcacgattaccgcggacaaatccacgagcacagtctacatggagctgagcaggctgagatttgaagacacggccatatattactgtgcgcgaacagacggactggggtccctggacccctggggccagggaaccctgatcaccgtctcctcag

SEQ ID NO: 1470 - protein, 118 aa, Artificial Sequence
  Description of Artificial Sequence: Synthetic polypeptide
QVQLVQSGAEVKKPGSSVKVSCKASGYSFNNFAINWVRQAPGQGLEWMGRITPFFGTSDNAQKFQGRVTITADKSTSTVYMELSRLRFEDTAIYYCARTDGLGSLDPWGQGTLITVSS

SEQ ID NO: 1471 - protein, 11 aa, Artificial Sequence
  Description of Artificial Sequence: Synthetic peptide
ARTDGLGSLDP

SEQ ID NO: 1472 - DNA, 337 bp, Artificial Sequence
  Description of Artificial Sequence: Synthetic polynucleotide
gatattgtgatgactcagtctccactctccctgcccgtcacccctggagagccggcctccatctcctgcaggtctagtcagagtctcctgcatagggatggacaaaactacttggattggtacctgcagaagccagggcagtctccacaactcctgatgtatttgggttctaatcgggcctccggggtccctgacaggttcagcggaagtggatcaggcacagattttacactgagaatcagcagagtggaggctgaggatgttggagtttattactgcatgcaagctctacaaactcctcacacttttggccaggggaccaagctggagatcaaac

SEQ ID NO: 1473 - protein, 112 aa, Artificial Sequence
  Description of Artificial Sequence: Synthetic polypeptide
DIVMTQSPLSLPVTPGEPASISCRSSQSLLHRDGQNYLDWYLQKPGQSPQLLMYLGSNRASGVPDRFSGSGSGTDFTLRISRVEAEDVGVYYCMQALQTPHTFGQGTKLEIK

SEQ ID NO: 1474 - protein, 9 aa, Artificial Sequence
  Description of Artificial Sequence: Synthetic peptide
MQALQTPHT

SEQ ID NO: 1475 - DNA, 352 bp, Artificial Sequence
  Description of Artificial Sequence: Synthetic polynucleotide
caggtgcagctggtgcagtctggggctgaggtgaagaagcctgggtcctcggtgaaggtctcctgcaaggcttctggaggcaccttcagcaactatgatatcatctgggtgcgacaggcccctggacaagggcttgagtggatgggagggatcatccctaagtttgcaacagcaaagtacgcaccgaagttccagggcagagtcacgattaccgcggacgagtctacgagcacagcctacatggagctgagcagcctgagatctgaggacacggccttgtattactgtgcgagatcgagtggctggtcttatgactactggggccagggaaccctggtcaccgtctcctcag

SEQ ID NO: 1476 - protein, 117 aa, Artificial Sequence
  Description of Artificial Sequence: Synthetic polypeptide
QVQLVQSGAEVKKPGSSVKVSCKASGGTFSNYDIIWVRQAPGQGLEWMGGIIPKFATAKYAPKFQGRVTITADESTSTAYMELSSLRSEDTALYYCARSSGWSYDYWGQGTLVTVSS

SEQ ID NO: 1477 - protein, 10 aa, Artificial Sequence
  Description of Artificial Sequence: Synthetic peptide
ARSSGWSYDY

SEQ ID NO: 1478 - DNA, 334 bp, Artificial Sequence
  Description of Artificial Sequence: Synthetic polynucleotide
gatattgtgatgactcagtctccactctccctgcccgtcacccctggagagccggcctccatctcctgcaggtctagtcagagcctcctccatagtcatggatacaactatttggattggtacctgcagaagccagggcagtctccacagctcctgatctatttgggttctaatcgggcctccggggtccctgacaggttcagtggcagtggatcaggcacagattttacactgaaaatcagcagagtggaggctgaggatgttggggtttattactgcatgcaagctctccaaaatatcactttcggccctgggaccaaagtggatatcaaac

SEQ ID NO: 1479 - protein, 111 aa, Artificial Sequence
  Description of Artificial Sequence: Synthetic polypeptide
DIVMTQSPLSLPVTPGEPASISCRSSQSLLHSHGYNYLDWYLQKPGQSPQLLIYLGSNRASGVPDRFSGSGSGTDFTLKISRVEAEDVGVYYCMQALQNITFGPGTKVDIK

SEQ ID NO: 1480 - protein, 8 aa, Artificial Sequence
  Description of Artificial Sequence: Synthetic peptide
MQALQNIT

SEQ ID NO: 1481 - DNA, 358 bp, Artificial Sequence
  Description of Artificial Sequence: Synthetic polynucleotide
caggtgcagctggtggagtctgggggaggcgtggtccagcctggaaagtccctgagcctctcctgtgcagcctctggattcaccttcagtcactttggcatgcactgggtccgccaggctccaggcaaggggctggagtggttggcagttattttgtatgatggaagtactacatactatgcagactccgtgaagggccgattcaccatatccagagacaattccaagaacacgctgtctctgcacatgaccaacctgaaacctgcggacacggctgtgtatttctgtgcgaaggagggaggagcaacagctgcccttgactactggggccagggaagcctggtcaccgtctcctcag

SEQ ID NO: 1482 - protein, 119 aa, Artificial Sequence
  Description of Artificial Sequence: Synthetic polypeptide
QVQLVESGGGVVQPGKSLSLSCAASGFTFSHFGMHWVRQAPGKGLEWLAVILYDGSTTYYADSVKGRFTISRDNSKNTLSLHMTNLKPADTAVYFCAKEGGATAALDYWGQGSLVTVSS

SEQ ID NO: 1483 - protein, 12 aa, Artificial Sequence
  Description of Artificial Sequence: Synthetic peptide
AKEGGATAALDY

SEQ ID NO: 1484 - DNA, 325 bp, Artificial Sequence
  Description of Artificial Sequence: Synthetic polynucleotide
gacatccagatgacccagtctccttccaccctgtctgcatctgtgggagacagagtcaccatcacttgccgggccagtcagagtattagtagctggttggcctggtatcagcagaaaccaggaaaagccccgaagctcctgatccataaggcgtctggtttagaaagtggggtcccatcaaggttcagcggcagtggatctgggacagagttcactctcaccatcagcagcctgcagcctgatgattttgcaacttattactgccaacagtataatagttattcttcgtggacgttcggccaagggaccaaggtggaaatgaaac

SEQ ID NO: 1485 - protein, 108 aa, Artificial Sequence
  Description of Artificial Sequence: Synthetic polypeptide
DIQMTQSPSTLSASVGDRVTITCRASQSISSWLAWYQQKPGKAPKLLIHKASGLESGVPSRFSGSGSGTEFTLTISSLQPDDFATYYCQQYNSYSSWTFGQGTKVEMK

SEQ ID NO: 1486 - protein, 10 aa, Artificial Sequence
  Description of Artificial Sequence: Synthetic peptide
QQYNSYSSWT

SEQ ID NO: 1487 - DNA, 355 bp, Artificial Sequence
  Description of Artificial Sequence: Synthetic polynucleotide
caggtgcagctggtgcagtctggggctgaggtgaagaagcctgggtcctcggtgaaggtctcctgcaaggcttctggaggcatcttcagcaattatggaatcagctgggtgcgacaggcccctggacaagggcttgagtggatgggagggatcatccctatctttggaacaccaaactacgcacagaagttccaggacagagtcaccattaccgcggacaaatccacgagcacggcctacctggagctgagcagcctgacatctgaggacacggccgtctattactgtgcgagagagttcggatctacggggggccaatactggggccagggaaccctggtcaccgtctcctcag

SEQ ID NO: 1488 - protein, 118 aa, Artificial Sequence
  Description of Artificial Sequence: Synthetic polypeptide
QVQLVQSGAEVKKPGSSVKVSCKASGGIFSNYGISWVRQAPGQGLEWMGGIIPIFGTPNYAQKFQDRVTITADKSTSTAYLELSSLTSEDTAVYYCAREFGSTGGQYWGQGTLVTVSS

SEQ ID NO: 1489 - protein, 11 aa, Artificial Sequence
  Description of Artificial Sequence: Synthetic peptide
AREFGSTGGQY

SEQ ID NO: 1490 - DNA, 325 bp, Artificial Sequence
  Description of Artificial Sequence: Synthetic polynucleotide
gacatccagatgacccagtctccatcctccctgtctgcatctgtaggagacagagtcaccatcacttgccaggcgagccaggacattagcagttatttaaactggtatcagcagaaaccagggaaaccccctaagctcctgatctacgatgcatccaatttggagacaggggtcccatcaaggttcagtggaagtggatctgggacagattttactttcaccatcagcagcctgcagcctgaagatgttgcaacatattactgtcaacagtataatggtctcccttcgcatacttacggccctgggaccaaagtggatatcaaac

SEQ ID NO: 1491 - protein, 108 aa, Artificial Sequence
  Description of Artificial Sequence: Synthetic polypeptide
DIQMTQSPSSLSASVGDRVTITCQASQDISSYLNWYQQKPGKPPKLLIYDASNLETGVPSRFSGSGSGTDFTFTISSLQPEDVATYYCQQYNGLPSHTYGPGTKVDIK

SEQ ID NO: 1492 - protein, 10 aa, Artificial Sequence
  Description of Artificial Sequence: Synthetic peptide
QQYNGLPSHT

SEQ ID NO: 1493 - DNA, 355 bp, Artificial Sequence
  Description of Artificial Sequence: Synthetic polynucleotide
caggtgcagctggtgcagtctggggctgagatgaagaagcctggcttttcggtgaaggtctcctgcaaggcttctggaggcattttcagcaactatgcaatcaactgggtgcgacaggcccctggacaagggcttgagtggatgggagggatcatccctgcctttggtacaccacactacgcacaaaagttccaaggcagactcacgattaccgcggacaaatcgacgagcacagcctacatggagttgaccagtctgacttccaatgacacggccctgtattactgtgcgagggcaatgggatctacagggggggactactggggccagggaaccctggtcgccgtctcctcag

SEQ ID NO: 1494 - protein, 118 aa, Artificial Sequence
  Description of Artificial Sequence: Synthetic polypeptide
QVQLVQSGAEMKKPGFSVKVSCKASGGIFSNYAINWVRQAPGQGLEWMGGIIPAFGTPHYAQKFQGRLTITADKSTSTAYMELTSLTSNDTALYYCARAMGSTGGDYWGQGTLVAVSS

SEQ ID NO: 1495 - protein, 11 aa, Artificial Sequence
  Description of Artificial Sequence: Synthetic peptide
ARAMGSTGGDY

SEQ ID NO: 1496 - DNA, 322 bp, Artificial Sequence
  Description of Artificial Sequence: Synthetic polynucleotide
gacatccagatgacccagtctccatcctccctgtctgcatcggtaggggacagcgtcaccatcacttgccaggcgaatcaagacattggcaactatttaaattggtatcagctcaaaccagggaaagcccctcagctcttgatcttcgatgcatccaatttggaaacaggggtcccatcaaggttcagtggacgtggatctgggacacattttaccttcaccatcagcagtctgcagcctgaagatatcgcaacatatttctgtcaacagtatcaaaatctccggtacacttttggccaggggaccaagctggagatcaaac

SEQ ID NO: 1497 - protein, 107 aa, Artificial Sequence
  Description of Artificial Sequence: Synthetic polypeptide
DIQMTQSPSSLSASVGDSVTITCQANQDIGNYLNWYQLKPGKAPQLLIFDASNLETGVPSRFSGRGSGTHFTFTISSLQPEDIATYFCQQYQNLRYTFGQGTKLEIK

SEQ ID NO: 1498 - protein, 9 aa, Artificial Sequence
  Description of Artificial Sequence: Synthetic peptide
QQYQNLRYT

SEQ ID NO: 1499 - DNA, 352 bp, Artificial Sequence
  Description of Artificial Sequence: Synthetic polynucleotide
caggttcagctggtgcagtctggagctgaggtgaagaagcctggggcctcagtgaaggtctcctgcaagacttctggttatacctttacccactacggtatcagctgggtgcgacaggcccctggacaagggcttgagtggatgggattgatcaacgcttacgatggtaatagaaactatgcacagaagttccagggcagagtcaccatgaccacagacacatccacgagtacagcgttcatggaactgaggagcctgagatctgacgacacggccatgtattactgtgcgaggtctgggggatggccaagtgactactggggccagggaacccaggtcaccgtctcctcag

SEQ ID NO: 1500 - protein, 117 aa, Artificial Sequence
  Description of Artificial Sequence: Synthetic polypeptide
QVQLVQSGAEVKKPGASVKVSCKTSGYTFTHYGISWVRQAPGQGLEWMGLINAYDGNRNYAQKFQGRVTMTTDTSTSTAFMELRSLRSDDTAMYYCARSGGWPSDYWGQGTQVTVSS

SEQ ID NO: 1501 - protein, 10 aa, Artificial Sequence
  Description of Artificial Sequence: Synthetic peptide
ARSGGWPSDY

SEQ ID NO: 1502 - DNA, 322 bp, Artificial Sequence
  Description of Artificial Sequence: Synthetic polynucleotide
gacatccagatgacccagtctccatcctccctgtctgcatctgtaggagacagagtcaccatcacttgccaggcgagtcaggacattagcaactatttaaattggtatcaacataaaccagggaaagcccctaaactcctcatctacgatgcatccaatttggaaacaggggtcccatcaaggttcagtggaagtggatctgggacagagttcactttcaccatcggcagcctgcagcctgaagatattgcaacatattactgtcaacaatatgataatctctcgtggacgttcggccaagggaccaaggtggaaatcaaac

SEQ ID NO: 1503 - protein, 107 aa, Artificial Sequence
  Description of Artificial Sequence: Synthetic polypeptide
DIQMTQSPSSLSASVGDRVTITCQASQDISNYLNWYQHKPGKAPKLLIYDASNLETGVPSRFSGSGSGTEFTFTIGSLQPEDIATYYCQQYDNLSWTFGQGTKVEIK

SEQ ID NO: 1504 - protein, 9 aa, Artificial Sequence
  Description of Artificial Sequence: Synthetic peptide
QQYDNLSWT

SEQ ID NO: 1505 - DNA, 355 bp, Artificial Sequence
  Description of Artificial Sequence: Synthetic polynucleotide
caggtgcagctggtgcagtctggggctgaggtgaagaagcctgggtcctcggtgaaggtctcctgtaaggtttctggaggcagcttcaccaactatgctatcaattgggtgcgacaggcccctggacaagggtttgagtggatgggagggatcatccctttctttaaaacaccaaactacgcacagaggttccagggcagagtcacgattaccgcggacgagtccacgagcacagcctacatggagctgagtggcctgagatctgacgacacggccatgtattactgtgggagagatggggggtctggggtaccggactactggggccagggaaccctggtcaccgtctcctcag

SEQ ID NO: 1506 - protein, 118 aa, Artificial Sequence; identical to SEQ ID NO: 79
  Description of Artificial Sequence: Synthetic polypeptide

SEQ ID NO: 1507 - protein, 11 aa, Artificial Sequence
  Description of Artificial Sequence: Synthetic peptide
GRDGGSGVPDY

SEQ ID NO: 1508 - DNA, 322 bp, Artificial Sequence
  Description of Artificial Sequence: Synthetic polynucleotide
gacatccagatgacccagtctccatcctcactgtcggcatctgtaggagacagagtcaccatcacttgtcgggcgagtcagggcattaacaattatttagcctggtttcagcagaaaccagggaaagcccctaagtccctgatctatgaagcagccaatttgcaaagcggggtcccatcaaagttcagcggcagcggatctgggacagagttcactctcaccatcagcagcctgcagcctgaagatattgcaacttattactgccaacagtataatagttacccttggacgttcggccaagggaccaaggtggaaatcaaac

SEQ ID NO: 1509 - protein, 107 aa, Artificial Sequence
  Description of Artificial Sequence: Synthetic polypeptide
DIQMTQSPSSLSASVGDRVTITCRASQGINNYLAWFQQKPGKAPKSLIYEAANLQSGVPSKFSGSGSGTEFTLTISSLQPEDIATYYCQQYNSYPWTFGQGTKVEIK

SEQ ID NO: 1510 - protein, 9 aa, Artificial Sequence
  Description of Artificial Sequence: Synthetic peptide
QQYNSYPWT

SEQ ID NO: 1511 - DNA, 361 bp, Artificial Sequence
  Description of Artificial Sequence: Synthetic polynucleotide
gaggtgcagctggtggagtctgggggaggcttagtacgccctggggggtccctgagactctcctgttcagcctctgggttcacctttaagacttatagcatgaactgggtccgccaggctccagggaaggggctggagtggcttgcatacattagtagtggcagtacttccatgtaccacgcagactctctgcagggccggttcaccatctccagagacgatgccaagaactcactgtatctgcaaatgaacagcctgggagccgaggacacggctgtctattactgtgcgagagaacatactagtcgttatgccgtctttgactactggggccagggaatcctggtcgccgtctcctcag

SEQ ID NO: 1512 - protein, 120 aa, Artificial Sequence
  Description of Artificial Sequence: Synthetic polypeptide
EVQLVESGGGLVRPGGSLRLSCSASGFTFKTYSMNWVRQAPGKGLEWLAYISSGSTSMYHADSLQGRFTISRDDAKNSLYLQMNSLGAEDTAVYYCAREHTSRYAVFDYWGQGILVAVSS

SEQ ID NO: 1513 - protein, 13 aa, Artificial Sequence
  Description of Artificial Sequence: Synthetic peptide
AREHTSRYAVFDY

SEQ ID NO: 1514 - DNA, 325 bp, Artificial Sequence
  Description of Artificial Sequence: Synthetic polynucleotide
gacatccagatgacccagtctccttccaccctgtctgcatctgtaggagacagagtcaccatcacttgccgggccagtcaaaatattcgtagttggttggcctggtatcagcagaaaccaggcaaagcccctaagctcctgatctataaggcgtctactttagaaagtggggtcccatccaggttcagcggcagtggatctgggacagaattcactctcaccatcagcagcctgcagcctgatgattctgcaacttattactgccaacagcataatactttttccgcgctcactttcggcggagggtcaaaggtggagatcaaac

SEQ ID NO: 1515 - protein, 108 aa, Artificial Sequence
  Description of Artificial Sequence: Synthetic polypeptide
DIQMTQSPSTLSASVGDRVTITCRASQNIRSWLAWYQQKPGKAPKLLIYKASTLESGVPSRFSGSGSGTEFTLTISSLQPDDSATYYCQQHNTFSALTFGGGSKVEIK

SEQ ID NO: 1516 - protein, 10 aa, Artificial Sequence
  Description of Artificial Sequence: Synthetic peptide
QQHNTFSALT

SEQ ID NO: 1517 - DNA, 376 bp, Artificial Sequence
  Description of Artificial Sequence: Synthetic polynucleotide
gaggtgcagctgttggagtctgggggaggcttggtacagcctggggggtccctgagactctcctgtgcagcctctggattcacctttcgcacctatggcatgaactgggtccgccaggctccagggaaggggctggagtgggtctcaggcattagtagtagtgccagtggtagtgccacatactacgcagactccgtgaagggccggttcaccatctccagagacaattccaacaacacactgtatctgcaaatgagcagcctgagagccgaggacacggccgtttattactgtgccgggggggtaggggatttttggagtggttataacccacttgactactggggccagggaaccctggtcaccgtctcctcag

SEQ ID NO: 1518 - protein, 125 aa, Artificial Sequence
  Description of Artificial Sequence: Synthetic polypeptide
EVQLLESGGGLVQPGGSLRLSCAASGFTFRTYGMNWVRQAPGKGLEWVSGISSSASGSATYYADSVKGRFTISRDNSNNTLYLQMSSLRAEDTAVYYCAGGVGDFWSGYNPLDYWGQGTLVTVSS

SEQ ID NO: 1519 - protein, 16 aa, Artificial Sequence
  Description of Artificial Sequence: Synthetic peptide
AGGVGDFWSGYNPLDY

SEQ ID NO: 1520 - DNA, 320 bp, Artificial Sequence
  Description of Artificial Sequence: Synthetic polynucleotide
gaaattgtgttgacacagtctccagccaccctgtctttgtctccgggggaaagagccaccctctcctgcagggccagtcagagtattagcagctacttagcctggtaccaacaaaaacctggccaggctcccaggctcctcatctatgatgcatccaacagggccactggcatcccagccaggttcagtggcagtgggtctgggacagacttcactctcaccatcagcagcctagaacctgaagattttgcagtttattactgtcagcagcgtagccactggctagggactttcggcggagggaccaaggtggagttcaa

SEQ ID NO: 1521 - protein, 106 aa, Artificial Sequence
  Description of Artificial Sequence: Synthetic polypeptide
EIVLTQSPATLSLSPGERATLSCRASQSISSYLAWYQQKPGQAPRLLIYDASNRATGIPARFSGSGSGTDFTLTISSLEPEDFAVYYCQQRSHWLGTFGGGTKVEF

SEQ ID NO: 1522 - protein, 9 aa, Artificial Sequence
  Description of Artificial Sequence: Synthetic peptide
QQRSHWLGT

SEQ ID NO: 1523 - DNA, 353 bp, Artificial Sequence
  Description of Artificial Sequence: Synthetic polynucleotide
caggtgcagctggtgcagtctggggctgaggtgaagaagcctgggtcctcggtgaaggtctcctgcacggcttctggaggcaccttcagcaattttgctatcggctgggtgcgacaggcccctggacaagggcttgagtggatgggcgcgatcatccctttgtttaatgtaccacactacgcacagaagtttcagggcagattcacgattacagcggacacatccacgagcacagcctacatggaactgagcagcctgacatctcaagacacggccgtgtattattgtacgagagcggccggtgggaccaacgaagactactggggccagggaaccctggtcaccgtctcctc

SEQ ID NO: 1524 - protein, 117 aa, Artificial Sequence
  Description of Artificial Sequence: Synthetic polypeptide
QVQLVQSGAEVKKPGSSVKVSCTASGGTFSNFAIGWVRQAPGQGLEWMGAIIPLFNVPHYAQKFQGRFTITADTSTSTAYMELSSLTSQDTAVYYCTRAAGGTNEDYWGQGTLVTVS

SEQ ID NO: 1525 - protein, 11 aa, Artificial Sequence
  Description of Artificial Sequence: Synthetic peptide
TRAAGGTNEDY

SEQ ID NO: 1526 - DNA, 319 bp, Artificial Sequence
  Description of Artificial Sequence: Synthetic polynucleotide
gaaattgtgttgacacagtctccagccaccctgtctttgtctccaggggaaagagccaccctctcctgcaggaccagtcagagtgttagcgactacttagcctggtaccaacagaaacctggccagcctcccaggctcctcatctttgatgcttccaacagggcctctggcgtcccagccaggttcagcggcagtgggtctgggacagacttcactctcaccatcagcagcctggcgactgaagattttgcagtttattactgtcagcagcgtagcaggtggccgttcacttttggccaggggaccaggctggacatca

SEQ ID NO: 1527 - protein, 106 aa, Artificial Sequence
  Description of Artificial Sequence: Synthetic polypeptide
EIVLTQSPATLSLSPGERATLSCRTSQSVSDYLAWYQQKPGQPPRLLIFDASNRASGVPARFSGSGSGTDFTLTISSLATEDFAVYYCQQRSRWPFTFGQGTRLDI

SEQ ID NO: 1528 - protein, 9 aa, Artificial Sequence
  Description of Artificial Sequence: Synthetic peptide
QQRSRWPFT

SEQ ID NO: 1529 - DNA, 382 bp, Artificial Sequence
  Description of Artificial Sequence: Synthetic polynucleotide
caggtgcagctggtgcagtctggggctgaggtgaagaagcctggggcctcagtgaaggtctcctgcaaggcttctggatacaccttcaccggctaccatattcactgggtgcgacaggcccctggacaagggcttgagtggatgggatggatcaaccctaacagtggtggcacaaagtatgcacagaaatttcagggtagtgtcaccatgaccagggacacgtccagcaccacagcctacttggaagtaaacaggctgacatctgacgacacggccgtgtattattgtgcgagagattccgagaagtacgatttttggagtggttattttacgacgccgacggattactggggccagggaaccctggtcaccgtctcctcag

SEQ ID NO: 1530 - protein, 127 aa, Artificial Sequence
  Description of Artificial Sequence: Synthetic polypeptide
QVQLVQSGAEVKKPGASVKVSCKASGYTFTGYHIHWVRQAPGQGLEWMGWINPNSGGTKYAQKFQGSVTMTRDTSSTTAYLEVNRLTSDDTAVYYCARDSEKYDFWSGYFTTPTDYWGQGTLVTVSS

SEQ ID NO: 1531 - protein, 20 aa, Artificial Sequence
  Description of Artificial Sequence: Synthetic peptide
ARDSEKYDFWSGYFTTPTDY

SEQ ID NO: 1532 - DNA, 322 bp, Artificial Sequence
  Description of Artificial Sequence: Synthetic polynucleotide
gacatccagatgacccagtctccttccaccctgtctgcatctgtaggagacagagtcaccatcacttgccgggccagtcagagtattagtagctgggtggcctggtatcagcagaaaccagggaaagcccctaagctcctgatctatgaggcgtctagtttacaaagtggggtctcatcaaggttcagcggcagtggatatgggacagagttcactctcaccatcagcagcctgcagcctgatgattttgcaacttattactgccaacagtttaatagttattcgtggacgttcggccaggggaccagggtggaaatcaaac

SEQ ID NO: 1533 - protein, 107 aa, Artificial Sequence
  Description of Artificial Sequence: Synthetic polypeptide
DIQMTQSPSTLSASVGDRVTITCRASQSISSWVAWYQQKPGKAPKLLIYEASSLQSGVSSRFSGSGYGTEFTLTISSLQPDDFATYYCQQFNSYSWTFGQGTRVEIK

SEQ ID NO: 1534 - protein, 9 aa, Artificial Sequence
  Description of Artificial Sequence: Synthetic peptide
QQFNSYSWT

SEQ ID NO: 1535 - DNA, 382 bp, Artificial Sequence
  Description of Artificial Sequence: Synthetic polynucleotide
caggtgcagctgcaggagtcgggcccaggactggtgaggccttcacagaccctgtccctcacctgcactgtctctggtgactccatgaacagtggtacttactactggacctggatccgccagcacccacaaaagggcctggagtggattggctacatgtcttacagtgggagcacctaccacaatccgtccctcaagagtcgagtttccatttcaatagacacgtctaagaaccagttctccttggggctgacctcggtgactgccgcggacacggccgtgtattactgtgcgagggccccctacccccgctactatgatagtcgtgcccatgattcttttgatatctggggccaagggacaatggtcaccgtctcttcag

SEQ ID NO: 1536 - protein, 127 aa, Artificial Sequence
  Description of Artificial Sequence: Synthetic polypeptide
QVQLQESGPGLVRPSQTLSLTCTVSGDSMNSGTYYWTWIRQHPQKGLEWIGYMSYSGSTYHNPSLKSRVSISIDTSKNQFSLGLTSVTAADTAVYYCARAPYPRYYDSRAHDSFDIWGQGTMVTVSS

SEQ ID NO: 1537 - protein, 19 aa, Artificial Sequence
  Description of Artificial Sequence: Synthetic peptide
ARAPYPRYYDSRAHDSFDI

SEQ ID NO: 1538 - DNA, 322 bp, Artificial Sequence
  Description of Artificial Sequence: Synthetic polynucleotide
gacatccagatgacccagtctccatcctccctgtctgcatctgtaggagacagagtcaccatcacttgccgggcaagtcagggcattagaaaagatttaggctggtatcagcaaaaaccagggaaagcccctcagcgcctgatctatgctgcatccagtttgcacagtggggtcccatcaaggttcagcggcagtggatttgggacagaattcactctcacaatcagcagcctgcagcctgaagattttgcaacttatttctgtctacagcataatagttacccccttaccttcggccaagggacacgactggacattaaac

SEQ ID NO: 1539 - protein, 107 aa, Artificial Sequence
  Description of Artificial Sequence: Synthetic polypeptide
DIQMTQSPSSLSASVGDRVTITCRASQGIRKDLGWYQQKPGKAPQRLIYAASSLHSGVPSRFSGSGFGTEFTLTISSLQPEDFATYFCLQHNSYPLTFGQGTRLDIK

SEQ ID NO: 1540 - protein, 9 aa, Artificial Sequence
  Description of Artificial Sequence: Synthetic peptide
LQHNSYPLT

SEQ ID NO: 1541 - DNA, 355 bp, Artificial Sequence; identical to SEQ ID NO: 125
  Description of Artificial Sequence: Synthetic polynucleotide

SEQ ID NO: 1542 - protein, 118 aa, Artificial Sequence; identical to SEQ ID NO: 7
  Description of Artificial Sequence: Synthetic polypeptide

SEQ ID NO: 1543 - protein, 11 aa, Artificial Sequence
  Description of Artificial Sequence: Synthetic peptide
ARVGGLGSYDY

SEQ ID NO: 1544 - DNA, 337 bp, Artificial Sequence
  Description of Artificial Sequence: Synthetic polynucleotide
gatattgtgatgactcagtctccactctccctgtccgtcactcttggagagccggcctccatctcctgcaggtctagtcagagcctcctgcatagggatggaaacaactatttggattggtacctgcagaagccaggacggtctccacaactcctgatctatttgggttctagtcgggcctccggggtccctgaccggttcagtggcagtggatcaggcacagattttacactgaaaatcagcagagtggaggctgaggatattggggtttattactgcatgcaagctctccaaactccccacacttttggccaggggaccaaactggagatcaaac

SEQ ID NO: 1545 - protein, 112 aa, Artificial Sequence; identical to SEQ ID NO: 8
  Description of Artificial Sequence: Synthetic polypeptide

SEQ ID NO: 1546 - protein, 9 aa, Artificial Sequence
  Description of Artificial Sequence: Synthetic peptide
MQALQTPHT

SEQ ID NO: 1547 - DNA, 355 bp, Artificial Sequence
  Description of Artificial Sequence: Synthetic polynucleotide
caggtgcagctggtgcagtctggggctgaggtgaagaagcctgggtcctcggtgaaggtctcctgcaaggcttctggaggcaacttcaataactttgctatgacctgggtgcgacaggcccctggacaagggcttgagtggatgggagggatcatccctatctttggtacaccaaactacgcacagaagttccagggcagagtcacgatcaccgcggacaaatccacgaacacagcctacatggagctgagcagcctgagatctgaggacacggccgtctattattgtacgagagaagggggtattgccgagttcgacccctggggccagggaaccctggtcaccgtctcctcag

SEQ ID NO: 1548 - protein, 118 aa, Artificial Sequence
  Description of Artificial Sequence: Synthetic polypeptide
QVQLVQSGAEVKKPGSSVKVSCKASGGNFNNFAMTWVRQAPGQGLEWMGGIIPIFGTPNYAQKFQGRVTITADKSTNTAYMELSSLRSEDTAVYYCTREGGIAEFDPWGQGTLVTVSS

SEQ ID NO: 1549 - protein, 11 aa, Artificial Sequence
  Description of Artificial Sequence: Synthetic peptide
TREGGIAEFDP

SEQ ID NO: 1550 - DNA, 322 bp, Artificial Sequence
  Description of Artificial Sequence: Synthetic polynucleotide
gacatccagatgacccagtctccattctccctgtctgcatctgtaggagacagagtcaccatcacttgccgggcaagtcagagcattagccattacttaaattggtatcagcagaaaccagggaaagcccctaaggtcctgatctatgctacatccactttgcaaaatggggtcccatcaaggttcagtggcagtggatctgggacagatttcactctcaccatcagcaatctgcaacctgaagattctgcaacctactactgtcaacagagtgaaactacccctcggacgttcggccaagggaccaaggtggaaatcaaac

SEQ ID NO: 1551 - protein, 107 aa, Artificial Sequence
  Description of Artificial Sequence: Synthetic polypeptide
DIQMTQSPFSLSASVGDRVTITCRASQSISHYLNWYQQKPGKAPKVLIYATSTLQNGVPSRFSGSGSGTDFTLTISNLQPEDSATYYCQQSETTPRTFGQGTKVEIK

SEQ ID NO: 1552 - protein, 9 aa, Artificial Sequence
  Description of Artificial Sequence: Synthetic peptide
QQSETTPRT

SEQ ID NO: 1553 - DNA, 355 bp, Artificial Sequence
  Description of Artificial Sequence: Synthetic polynucleotide
caggtgcagctggtgcagtctggggctgaggtgaagaagcctgggtcctcggtgaaggtctcctgcaaggcttctggaggcaccttcagcaactttgctatcagctgggtgcgacaggcccctggacaagggcttgagtggatgggaaggatcatccctgtctttggtacaccaaagtacgcacagaggttccagggcagagtcacgattaccgcggacacattaacgagcacagcctacatggaactgagcagcctgagatctgaggacacggccgtctattactgtgcgcgagatgatggctccggcagcttgtattactggggccagggaaccctggtcaccgtctcctcag

SEQ ID NO: 1554 - protein, 118 aa, Artificial Sequence
  Description of Artificial Sequence: Synthetic polypeptide
QVQLVQSGAEVKKPGSSVKVSCKASGGTFSNFAISWVRQAPGQGLEWMGRIIPVFGTPKYAQRFQGRVTITADTLTSTAYMELSSLRSEDTAVYYCARDDGSGSLYYWGQGTLVTVSS

SEQ ID NO: 1555 - protein, 11 aa, Artificial Sequence
  Description of Artificial Sequence: Synthetic peptide
ARDDGSGSLYY

SEQ ID NO: 1556 - DNA, 337 bp, Artificial Sequence
  Description of Artificial Sequence: Synthetic polynucleotide
gatattgtgatgactcagtctccactctccctgcccgtcacccctggagagccggcctccttctcctgcaggtctagtcagagcctcctgcatcgtgatggaaacaactatttggattggtacctgcagaagccagggcagtctccacaactcctgatctatttgggttctcatcgggcctccggggtccctgacaggttcagtggcagtgggtcaggcacagattttacactgaaaatcaacagagtggaggctgaggatgttggggtttattactgcatgcaagctctacaaactccgatcaccttcggccaagggacacgactggagattaaac

SEQ ID NO: 1557 - protein, 112 aa, Artificial Sequence
  Description of Artificial Sequence: Synthetic polypeptide
DIVMTQSPLSLPVTPGEPASFSCRSSQSLLHRDGNNYLDWYLQKPGQSPQLLIYLGSHRASGVPDRFSGSGSGTDFTLKINRVEAEDVGVYYCMQALQTPITFGQGTRLEIK

SEQ ID NO: 1558 - protein, 9 aa, Artificial Sequence
  Description of Artificial Sequence: Synthetic peptide
MQALQTPIT

SEQ ID NO: 1559 - DNA, 355 bp, Artificial Sequence
  Description of Artificial Sequence: Synthetic polynucleotide
caggtccagctggtgcagtctggggctgaggtgaagaagcctgggtcctcggtgaaggtctcctgcaagtcttctggaggcaccttcaacaactttgctatcaattgggtgcgacaggcccctggacaagggcttgagtggatgggaaatatcatccctatctttggtacagcaaactacggacagaagttccaggacaaaatcacgattaccgcggacaaatccacgaccacagccaacctggagttgagcagcctgagatctgaggacacggccatatattattgtgcgagaacgggaggtttggggagtcttgacgactggggacagggaaccctggtcatcgtctcctcag

SEQ ID NO: 1560 - protein, 118 aa, Artificial Sequence
  Description of Artificial Sequence: Synthetic polypeptide
QVQLVQSGAEVKKPGSSVKVSCKSSGGTFNNFAINWVRQAPGQGLEWMGNIIPIFGTANYGQKFQDKITITADKSTTTANLELSSLRSEDTAIYYCARTGGLGSLDDWGQGTLVIVSS

SEQ ID NO: 1561 - protein, 11 aa, Artificial Sequence
  Description of Artificial Sequence: Synthetic peptide
ARTGGLGSLDD

SEQ ID NO: 1562 - DNA, 337 bp, Artificial Sequence
  Description of Artificial Sequence: Synthetic polynucleotide
gatattgtgatgactcagtctccactctccctgcccgtcacccctggagagccggcctccatctcctgcaggtctagtcagagcctcctgcataggagtggatacaactatttggattggtacctgcagaagccagggcagcctccacagctcctgatctatttggcttctaatcgggcctccggggtccctgacaggttcagtggcagtggatcaggcacagattttacactgaaaatcagcagagtggaggctgaagatgttggggtttattactgcatgcaagctctacaaactccccacacttttggccaggggaccaagctggagatcaaac

SEQ ID NO: 1563 - protein, 112 aa, Artificial Sequence
  Description of Artificial Sequence: Synthetic polypeptide
DIVMTQSPLSLPVTPGEPASISCRSSQSLLHRSGYNYLDWYLQKPGQPPQLLIYLASNRASGVPDRFSGSGSGTDFTLKISRVEAEDVGVYYCMQALQTPHTFGQGTKLEIK

SEQ ID NO: 1564 - protein, 9 aa, Artificial Sequence
  Description of Artificial Sequence: Synthetic peptide
MQALQTPHT

SEQ ID NO: 1565 - DNA, 373 bp, Artificial Sequence
  Description of Artificial Sequence: Synthetic polynucleotide
caggtgcagctggtggagtctggcggaggcgtggtccagcctgggaggtccctgagactctcctgttcagcctctggattcaccttcaggagctatgctttgcactgggtccgccaggctccaggcaaggggctggagtgggtggcagttatatcatatgctggaaactatgaacactacgcagactccgtgaagggccgattcaccatctccagagacaattccaagaacaccttgtatctgcaaatgaacagcctgagagctgaggacacggctatttattactgtgcgagagccgacaatttttggagtgattattttggaggctactttgactactggggccagggatccctggtcaccgtctcctcag

SEQ ID NO: 1566 - protein, 124 aa, Artificial Sequence
  Description of Artificial Sequence: Synthetic polypeptide
QVQLVESGGGVVQPGRSLRLSCSASGFTFRSYALHWVRQAPGKGLEWVAVISYAGNYEHYADSVKGRFTISRDNSKNTLYLQMNSLRAEDTAIYYCARADNFWSDYFGGYFDYWGQGSLVTVSS

SEQ ID NO: 1567 - protein, 17 aa, Artificial Sequence
  Description of Artificial Sequence: Synthetic peptide
ARADNFWSDYFGGYFDY

SEQ ID NO: 1568 - DNA, 322 bp, Artificial Sequence
  Description of Artificial Sequence: Synthetic polynucleotide
gaaattgtgttgacacagtctccagccaccctgtctttgtctccaggtgaaagagccaccctctcctgcagggccagtcagagtattagcagctacttagcctggtaccaacagaaacctggccaggctcccaggctcctcatctatgatccatccaacagggcccctggcatcccagccaggttcagtggcagtgggtctgggacagacttcactctcaccatcagcagcctagagcctgaagattttgcagtttattactgtcagcagcgtagcagttggcctcggacgttcggccaagggaccagggtggaagtcaaac

SEQ ID NO: 1569 - protein, 107 aa, Artificial Sequence
  Description of Artificial Sequence: Synthetic polypeptide
EIVLTQSPATLSLSPGERATLSCRASQSISSYLAWYQQKPGQAPRLLIYDPSNRAPGIPARFSGSGSGTDFTLTISSLEPEDFAVYYCQQRSSWPRTFGQGTRVEVK

SEQ ID NO: 1570 - protein, 9 aa, Artificial Sequence
  Description of Artificial Sequence: Synthetic peptide
QQRSSWPRT

SEQ ID NO: 1571 - DNA, 361 bp, Artificial Sequence
  Description of Artificial Sequence: Synthetic polynucleotide
gaggtgcagctggtggagtctgggggaggcttggtacagcctggggggtccctaagactctcctgtacagcctctggattcaccctcagtacctatgccgtgaactgggtccgccaggctccagggaaggggctggagtgggtttcatacattagtagtggtagcacttccatatactacccagactctgtgcagggccggttcaccatctccagagacgatgccaacaactcactgtttctacaactgaacggcctgagagccgaggacacggctgtttattactgtgcgatcaatttagtggcttcttattcctactttgacttgtggggccagggaaccctggtcaccgtctcctcag

SEQ ID NO: 1572 - protein, 120 aa, Artificial Sequence
  Description of Artificial Sequence: Synthetic polypeptide
EVQLVESGGGLVQPGGSLRLSCTASGFTLSTYAVNWVRQAPGKGLEWVSYISSGSTSIYYPDSVQGRFTISRDDANNSLFLQLNGLRAEDTAVYYCAINLVASYSYFDLWGQGTLVTVSS

SEQ ID NO: 1573 - protein, 13 aa, Artificial Sequence
  Description of Artificial Sequence: Synthetic peptide
AINLVASYSYFDL

SEQ ID NO: 1574 - DNA, 325 bp, Artificial Sequence
  Description of Artificial Sequence: Synthetic polynucleotide
gacatccagatgacccagtctccttccaccctgtctgcatctgtaggagacagagtcgccatcagttgccgggccagtcatagcattagtaggtggttggcctggtatcagcagaaaccagggaaagcccctaaactcctgatctataaggcgtctactttggaaagtggggtcccgtcaaggttcagcggcagtggatctgggacagaattcactctcaccatcaccagcctgcagcctgatgactttgcaacttattactgccaacagtataatactttttcggcgctcacgttcggcggagggaccaaggtggagatcaaac

SEQ ID NO: 1575 - protein, 108 aa, Artificial Sequence
  Description of Artificial Sequence: Synthetic polypeptide
DIQMTQSPSTLSASVGDRVAISCRASHSISRWLAWYQQKPGKAPKLLIYKASTLESGVPSRFSGSGSGTEFTLTITSLQPDDFATYYCQQYNTFSALTFGGGTKVEIK

SEQ ID NO: 1576 - protein, 10 aa, Artificial Sequence
  Description of Artificial Sequence: Synthetic peptide
QQYNTFSALT

SEQ ID NO: 1577 - DNA, 352 bp, Artificial Sequence
  Description of Artificial Sequence: Synthetic polynucleotide
caggtgcagctggtgcagtctggggctgaggtgaagaagcctgggtcctccgtgaaggtctcctgcaagacttctggaggcaccttcagcaactatgctatcagctgggtgcgacaggcccctggacaagggcttgagtggatgggagggatcatccctatctttggtacagcaaactacgcacagaagttccagggcagagtcaccattaccgcggacgaatccacgagcacagcctacatggagctgaacaacctgagatctgaggacacggccgtgtattactgtgcgcaagattcgtttgagcaactcgccaggtggggccagggaaccctggtcatcgtctcttcag

SEQ ID NO: 1578 - protein, 117 aa, Artificial Sequence
  Description of Artificial Sequence: Synthetic polypeptide
QVQLVQSGAEVKKPGSSVKVSCKTSGGTFSNYAISWVRQAPGQGLEWMGGIIPIFGTANYAQKFQGRVTITADESTSTAYMELNNLRSEDTAVYYCAQDSFEQLARWGQGTLVIVSS

SEQ ID NO: 1579 - protein, 10 aa, Artificial Sequence
  Description of Artificial Sequence: Synthetic peptide
AQDSFEQLAR

SEQ ID NO: 1580 - DNA, 337 bp, Artificial Sequence
  Description of Artificial Sequence: Synthetic polynucleotide
gatattgtgatgactcagtctccactctccctgcccgtcacccctggagagccggcctccatctcctgcaggtctagtcagagcctcctgcataggagtggagacaactatatgcattggtacttgcagaagccagggcagtctccacagctcctcatctatttgagttctaatcgggcctccggggtccctgacaggttcagtggcagtggatcaggcacagattttacactgaaaatcagcagagtggaggctgaggatgttggggtttattactgcatgcaaggtctacaaactccgtacacttttggccaggggaccaggctggagatcaaac

SEQ ID NO: 1581 - protein, 112 aa, Artificial Sequence
  Description of Artificial Sequence: Synthetic polypeptide
DIVMTQSPLSLPVTPGEPASISCRSSQSLLHRSGDNYMHWYLQKPGQSPQLLIYLSSNRASGVPDRFSGSGSGTDFTLKISRVEAEDVGVYYCMQGLQTPYTFGQGTRLEIK

SEQ ID NO: 1582 - protein, 9 aa, Artificial Sequence
  Description of Artificial Sequence: Synthetic peptide
MQGLQTPYT

SEQ ID NO: 1583 - DNA, 361 bp, Artificial Sequence
  Description of Artificial Sequence: Synthetic polynucleotide
caggtgcagctggtgcagtctggggctgaggtgaagaagcctggggcctcagtgagggtctcctgcaaggcatctggatacagcttcaccaccacctctattcactgggtgcgacaggcccctggacaaggtcttgagtggatgggaataatcaaccctggtagtggtagcacgagctacgcacagaagttccagggcagagtcaccatgaccagggacacgtcgacgagcactgtctacatggagctgagcagcctgagatctgaagacacggccgtgtattactgtgcgacagatcgcctcaaggggagctggtactgggtctattggggccagggaactctggtcaccgtctcgtcag

SEQ ID NO: 1584 - protein, 120 aa, Artificial Sequence
  Description of Artificial Sequence: Synthetic polypeptide
QVQLVQSGAEVKKPGASVRVSCKASGYSFTTTSIHWVRQAPGQGLEWMGIINPGSGSTSYAQKFQGRVTMTRDTSTSTVYMELSSLRSEDTAVYYCATDRLKGSWYWVYWGQGTLVTVSS

SEQ ID NO: 1585 - protein, 13 aa, Artificial Sequence
  Description of Artificial Sequence: Synthetic peptide
ATDRLKGSWYWVY

SEQ ID NO: 1586 - DNA, 328 bp, Artificial Sequence
  Description of Artificial Sequence: Synthetic polynucleotide
gacatcgtgatgacccagtctccagactccctggctgtgtctctgggcgagagggccaccatcaactgcaggtccagccaggatgttttatacagctccaacaataagaacttcttagcttggtatcagcagaaaccaggacagcctcctaagctactcatttaccgggcatctatccgggaatccggggtccctgaccgattcagtggcagcgggtctgggacagagttcactctcaccatcagcaacttgcaggctgaagatgcggcagtttactattgtcagcaatattattcttttggccaggggaccaagctggagatcaaac

SEQ ID NO: 1587 - protein, 109 aa, Artificial Sequence
  Description of Artificial Sequence: Synthetic polypeptide
DIVMTQSPDSLAVSLGERATINCRSSQDVLYSSNNKNFLAWYQQKPGQPPKLLIYRASIRESGVPDRFSGSGSGTEFTLTISNLQAEDAAVYYCQQYYSFGQGTKLEIK

SEQ ID NO: 1588 - protein, 5 aa, Artificial Sequence
  Description of Artificial Sequence: Synthetic peptide
QQYYS

SEQ ID NO: 1589 - DNA, 352 bp, Artificial Sequence
  Description of Artificial Sequence: Synthetic polynucleotide
caggtgcagctgcaggagtcgggcccaggactggtgaagccttcggggaccctgtccctcacctgctctgtctctggtggctccatcatcagtagtcactggtggagctgggtccgccagtccccagggaagggtctggagtggatgggccaaatctttcatactgggatcaccgactacaacccgtccctcaagagtcgagtcaccatatcagtagacgagtccaacaataacttctccctgaggatgaggtctgtgaccgtcgcggacacggccgtttatttttgtgcgagacttggacatggatcgattccctactggggccagggagtcctggtcaccgtctcttcag

SEQ ID NO: 1590 - protein, 117 aa, Artificial Sequence
  Description of Artificial Sequence: Synthetic polypeptide
QVQLQESGPGLVKPSGTLSLTCSVSGGSIISSHWWSWVRQSPGKGLEWMGQIFHTGITDYNPSLKSRVTISVDESNNNFSLRMRSVTVADTAVYFCARLGHGSIPYWGQGVLVTVSS

SEQ ID NO: 1591 - protein, 10 aa, Artificial Sequence
  Description of Artificial Sequence: Synthetic peptide
ARLGHGSIPY

SEQ ID NO: 1592 - DNA, 337 bp, Artificial Sequence
  Description of Artificial Sequence: Synthetic polynucleotide
  modified_base (40)..(40): a, c, t, g, unknown or other
gatattgtgatgactcagtctccactctccctgcccgtcncccctggagagccggcctccatctcctgcaggtctagtcagagcctcctatataatggtggattcaactatgtggattggttcctgcagaagccagggcagtctccacagctcctgatctttatgggttctaatcgggcctccggggtccctgacaggttcagtggcagtggatcaggcacagatttcacactgaaaatcagcagagtggaggctgaggatgttggggtttattactgcatgcaaggtctacaaactccactcactttcggccctgggaccaaagtggatatgaaac

SEQ ID NO: 1593 - protein, 112 aa, Artificial Sequence
  Description of Artificial Sequence: Synthetic polypeptide
  MOD_RES (14)..(14): Any amino acid
DIVMTQSPLSLPVXPGEPASISCRSSQSLLYNGGFNYVDWFLQKPGQSPQLLIFMGSNRASGVPDRFSGSGSGTDFTLKISRVEAEDVGVYYCMQGLQTPLTFGPGTKVDMK

SEQ ID NO: 1594 - protein, 9 aa, Artificial Sequence
  Description of Artificial Sequence: Synthetic peptide
MQGLQTPLT

SEQ ID NO: 1595 - DNA, 359 bp, Artificial Sequence
  Description of Artificial Sequence: Synthetic polynucleotide
caggttcagctggtgcagtctggagctgaggtgaagaagcctggggcctcagtgaaggtctcctgcaaggcctctggctacagctttaacacctacggtatcagctgggtgcgacaggcccctggacaaggacttgagtggatgggatggatcagcggttacaatggtgacacaaactacgcacagaagctccagggcagagtcaccatgaccacagacacatccacgagcacagcctacatggagttgaggagcctgagatctgacgacacggccgtgtattactgtgcgagagtaacgactacgggtttctggtacttcgatctctggggccgtggcaccctggtcactgtctcctc

SEQ ID NO: 1596 - protein, 119 aa, Artificial Sequence
  Description of Artificial Sequence: Synthetic polypeptide
QVQLVQSGAEVKKPGASVKVSCKASGYSFNTYGISWVRQAPGQGLEWMGWISGYNGDTNYAQKLQGRVTMTTDTSTSTAYMELRSLRSDDTAVYYCARVTTTGFWYFDLWGRGTLVTVS

SEQ ID NO: 1597 - protein, 13 aa, Artificial Sequence
  Description of Artificial Sequence: Synthetic peptide
ARVTTTGFWYFDL

SEQ ID NO: 1598 - DNA, 337 bp, Artificial Sequence
  Description of Artificial Sequence: Synthetic polynucleotide
gatattgtgatgactcagtctccactctccctgcccgtcacccctggagagccggcctccatctcctgcaaatctagtcagagcctcctgcatagtcatgaaaagagctatttggattggtacctgcagaagccagggcagtctccacagctcctgatctatttgggttctaatcgggcctccggggtccctgacaggttcagtggcagtggatcaggcacagattttacactgaagatcagcagagtggaggctgaggatgttggggtttattactgcatgcaatctctacaaaccccgctcactttcggcggagggaccagggtggagatcaaac

SEQ ID NO: 1599 - protein, 112 aa, Artificial Sequence
  Description of Artificial Sequence: Synthetic polypeptide
DIVMTQSPLSLPVTPGEPASISCKSSQSLLHSHEKSYLDWYLQKPGQSPQLLIYLGSNRASGVPDRFSGSGSGTDFTLKISRVEAEDVGVYYCMQSLQTPLTFGGGTRVEIK

SEQ ID NO: 1600 - protein, 9 aa, Artificial Sequence
  Description of Artificial Sequence: Synthetic peptide
MQSLQTPLT

SEQ ID NO: 1601 - DNA, 361 bp, Artificial Sequence
  Description of Artificial Sequence: Synthetic polynucleotide
gaggtgcagctggtggagtctgggggaggcttggtccagcctggggggtccctgagactctcctgtgcagtctctggactctctttcggtgaccataccatgaactgggtccgccaggctccagggaagggactggagtgggttgcctacattagttctactagtagtgccatatactacgcagcctctgtggagggccgattcaccgtttccagagacgatgccaagaactcactgtatctgcaaatgaacagcctgagagccgaggacacggctgtttattactgtgcgagagaacatagtagtcattactccgtctttgactactggggccagggaaccctggtcaccgtctcctcag

SEQ ID NO: 1602 - protein, 120 aa, Artificial Sequence; identical to SEQ ID NO: 53
  Description of Artificial Sequence: Synthetic polypeptide

SEQ ID NO: 1603 - protein, 13 aa, Artificial Sequence
  Description of Artificial Sequence: Synthetic peptide
AREHSSHYSVFDY

SEQ ID NO: 1604 - DNA, 325 bp, Artificial Sequence
  Description of Artificial Sequence: Synthetic polynucleotide
gacatccagatgacccagtctccttccaccctgtctgcctctgtaggagacagagtcaccatcacttgtcgggccagtcagagtattagtcgctggttggcctggtatcagcagaaaccagggaaagcccctaagctcctgatctataaggcgtctactttagaaagtggggtcccatcaaggttcagcggcagtggatctgggacagaattcactctcaccatcagcagcctgcagcctgatgattttgcaacttattactgccagcagtttaatactttttccgcgctcactttcggcggagggaccaaggtggagatcaaac

SEQ ID NO: 1605 - protein, 108 aa, Artificial Sequence; identical to SEQ ID NO: 54
  Description of Artificial Sequence: Synthetic polypeptide

SEQ ID NO: 1606 - protein, 10 aa, Artificial Sequence
  Description of Artificial Sequence: Synthetic peptide
QQFNTFSALT

SEQ ID NO: 1607 - DNA, 382 bp, Artificial Sequence
  Description of Artificial Sequence: Synthetic polynucleotide
caggtgcagctggtgcagtctggggctgaggtgaagaagcctggggcctcagtgaaggtctcctgcaaggcttctggatactccttcaccggctactccatccaatgggtgcgacaggcccctggacaagggcttgagtggatgggatggatcaaccctaacgatggtggcacaaattatgcacagaagtttcaggacagagtcaccatgaccagggacacctccatcaccacagtctacatggaactgaggagactgagatccgacgacacggccgtttattactgtgcgagagattccgacagacacgatttttggagtgggtactttacgacgcctacggacttctggggccagggaaccctaatcaccgtctcctcag

SEQ ID NO: 1608 - protein, 127 aa, Artificial Sequence
  Description of Artificial Sequence: Synthetic polypeptide
QVQLVQSGAEVKKPGASVKVSCKASGYSFTGYSIQWVRQAPGQGLEWMGWINPNDGGTNYAQKFQDRVTMTRDTSITTVYMELRRLRSDDTAVYYCARDSDRHDFWSGYFTTPTDFWGQGTLITVSS

SEQ ID NO: 1609 - protein, 20 aa, Artificial Sequence
  Description of Artificial Sequence: Synthetic peptide
ARDSDRHDFWSGYFTTPTDF

SEQ ID NO: 1610 - DNA, 322 bp, Artificial Sequence
  Description of Artificial Sequence: Synthetic polynucleotide
gacatccagatgacccagtctccttccaccctgtctgcatctgtcggagacagagtcaccatcacttgccgggccagtcagagtattgttaggtgggtggcctggtatcagcagaaaccagggaaagcacctaagctcctgatctctgaggcgtctaatttacaaagtggggtcccatcaaggttcagcggcagtggatctgagacagaattcactctcaccatcagcagcctgcagcctgatgatcttgcaatgtattattgccaacagtataatagttattcgtggacgttcggccaagggaccaaggtggaaatcaaac

SEQ ID NO: 1611 - protein, 107 aa, Artificial Sequence
  Description of Artificial Sequence: Synthetic polypeptide
DIQMTQSPSTLSASVGDRVTITCRASQSIVRWVAWYQQKPGKAPKLLISEASNLQSGVPSRFSGSGSETEFTLTISSLQPDDLAMYYCQQYNSYSWTFGQGTKVEIK

SEQ ID NO: 1612 - protein, 9 aa, Artificial Sequence
  Description of Artificial Sequence: Synthetic peptide
QQYNSYSWT

SEQ ID NO: 1613 - DNA, 369 bp, Artificial Sequence
  Description of Artificial Sequence: Synthetic polynucleotide
gaggtgcagctgttggagtctgggggaggcctggtacagccgggggggtccctgagactctcctgtgcagcctctggattcacctttagcgacttcgccatgatttgggtccgccaggctccagggaaggggctggagtgggtctcttctattactggtagtggtcagaccacatactacgcagactccttgaagggccgcttcaccgtttccagagacaattccaagaatatggtgtatctgcaaatgaacagcctgagagccgacgacacggccgtcttttattgtgcgaaagatgtcgtcgcggggagcagcagttggtactacatggacttccggggcaatgggaccgcggtcaccgtctcctca

SEQ ID NO: 1614 - protein, 123 aa, Artificial Sequence
  Description of Artificial Sequence: Synthetic polypeptide
EVQLLESGGGLVQPGGSLRLSCAASGFTFSDFAMIWVRQAPGKGLEWVSSITGSGQTTYYADSLKGRFTVSRDNSKNMVYLQMNSLRADDTAVFYCAKDVVAGSSSWYYMDFRGNGTAVTVSS

SEQ ID NO: 1615 - protein, 16 aa, Artificial Sequence
  Description of Artificial Sequence: Synthetic peptide
AKDVVAGSSSWYYMDF

SEQ ID NO: 1616 - DNA, 322 bp, Artificial Sequence
  Description of Artificial Sequence: Synthetic polynucleotide
gaaatagtgatgacgcagtctccagccaccctgtctgtgtctgcagggaaaagagccaccctctactgcagggccagtcagagtgttgccggcaacgtagcctggtaccagcagaaacctggccaggctcccaggctcctcatctatgatgcatccaccagggcccctggcatcccagccaggttcagtggcagtgggtctgggacagagttcactctcaccatcagcagcctgcagtctgaagattttgcaatttattactgtcagcagtgtaatcactacccgggcacttttggccaggggaccaggctggagatcaaac

SEQ ID NO: 1617 - protein, 107 aa, Artificial Sequence
  Description of Artificial Sequence: Synthetic polypeptide
EIVMTQSPATLSVSAGKRATLYCRASQSVAGNVAWYQQKPGQAPRLLIYDASTRAPGIPARFSGSGSGTEFTLTISSLQSEDFAIYYCQQCNHYPGTFGQGTRLEIK

SEQ ID NO: 1618 - protein, 9 aa, Artificial Sequence
  Description of Artificial Sequence: Synthetic peptide
QQCNHYPGT

SEQ ID NO: 1619 - DNA, 352 bp, Artificial Sequence; identical to SEQ ID NO: 163
  Description of Artificial Sequence: Synthetic polynucleotide

SEQ ID NO: 1620 - protein, 117 aa, Artificial Sequence; identical to SEQ ID NO: 45
  Description of Artificial Sequence: Synthetic polypeptide

SEQ ID NO: 1621 - protein, 10 aa, Artificial Sequence
  Description of Artificial Sequence: Synthetic peptide
ARDTAMVLDY

SEQ ID NO: 1622 - DNA, 322 bp, Artificial Sequence
  Description of Artificial Sequence: Synthetic polynucleotide
gacatccagatgacccagtctccatcctccctgtctgcatctgtaggagacagagtcaccatcacttgccgggcaagtcagggcattagaaatgatttagcctggtatcagcagaagccagggaaagcccctaagcgcctgatctctgctgcatccattttggaaagtggggtcccatcaaggttcagcggcagtggatctgggacagagttcactctcacaatcagcagcctgcagcctgacgattttgcaagttattactgtctacagcataaaagttacccgctcactttcggaggagggaccaaggtggagatcaaac

SEQ ID NO: 1623 - protein, 107 aa, Artificial Sequence; identical to SEQ ID NO: 46
  Description of Artificial Sequence: Synthetic polypeptide

SEQ ID NO: 1624 - protein, 9 aa, Artificial Sequence
  Description of Artificial Sequence: Synthetic peptide
LQHKSYPLT

SEQ ID NO: 1625 - DNA, 358 bp, Artificial Sequence
  Description of Artificial Sequence: Synthetic polynucleotide
caggtgcagctgcaggagtcgggcccaggactggtgaagccttcggggaccctgtccctcacctgcgatgtctctggtgtccccatcgtcagtagtaattggtggagttgggtccgccagaccccagggaaggggctggagtggatcggagaagtctttcatactgggatcaccaactacaacccgtccctcaagagtcgagtcaccatatcagtggacacgtccaagaggcaggtctccctgaacttgaattctgtgaccgccgcggatacggccatctattactgtgcgagagatggtagtagtggctggtatgcgaaagactggggccagggaaccctggtcgtcgtctcctcag

SEQ ID NO: 1626 - protein, 119 aa, Artificial Sequence
  Description of Artificial Sequence: Synthetic polypeptide
QVQLQESGPGLVKPSGTLSLTCDVSGVPIVSSNWWSWVRQTPGKGLEWIGEVFHTGITNYNPSLKSRVTISVDTSKRQVSLNLNSVTAADTAIYYCARDGSSGWYAKDWGQGTLVVVSS

SEQ ID NO: 1627 - protein, 12 aa, Artificial Sequence
  Description of Artificial Sequence: Synthetic peptide
ARDGSSGWYAKD

SEQ ID NO: 1628 - DNA, 319 bp, Artificial Sequence
  Description of Artificial Sequence: Synthetic polynucleotide
gaaattgtgttgacacagtctccagccaccctgtctttgtctccaggggaaagagccaccctctcctgcagggccagtcagagtgttggcaactccttagcctggtaccaacagaaacctggccaggctcccagcctcctcatctatgatatatcgaacagggccactggcatcccagccagattcagtggcagtgggtctgggacagacttcactctcaccatcagccgcctggagcctgaagattttgtagtttattactgtctccagcgtagtagctggctcacgttcggcggagggaccaaaatagagatcaaac

SEQ ID NO: 1629 - protein, 106 aa, Artificial Sequence
  Description of Artificial Sequence: Synthetic polypeptide
EIVLTQSPATLSLSPGERATLSCRASQSVGNSLAWYQQKPGQAPSLLIYDISNRATGIPARFSGSGSGTDFTLTISRLEPEDFVVYYCLQRSSWLTFGGGTKIEIK

SEQ ID NO: 1630 - protein, 8 aa, Artificial Sequence
  Description of Artificial Sequence: Synthetic peptide
LQRSSWLT

SEQ ID NO: 1631 - DNA, 370 bp, Artificial Sequence
  Description of Artificial Sequence: Synthetic polynucleotide
gaggtgcagctggtggagtctggtggagtcttggtgcagcctggggggtccctgaagctctcctgtgcagcctctggattcactttcagtggctatagcatgaactgggtccgccaggctccagggaaggggctggagtgggtctcatatattagtagtgacagtactactcctacaatatactacgcagagtccgtgaagggccgattcaccatctccagagacaacgccaagaactctctgtttctgcaaatgaacagcctgagagccgaggacacggctgtctattactgtgcgagagagggttccgatttttggagtggctcctttgactactggggccagggaaccctggtcaccgtctcctcag

SEQ ID NO: 1632 - protein, 123 aa, Artificial Sequence
  Description of Artificial Sequence: Synthetic polypeptide
EVQLVESGGVLVQPGGSLKLSCAASGFTFSGYSMNWVRQAPGKGLEWVSYISSDSTTPTIYYAESVKGRFTISRDNAKNSLFLQMNSLRAEDTAVYYCAREGSDFWSGSFDYWGQGTLVTVSS

SEQ ID NO: 1633 - protein, 14 aa, Artificial Sequence
  Description of Artificial Sequence: Synthetic peptide
AREGSDFWSGSFDY

SEQ ID NO: 1634 - DNA, 319 bp, Artificial Sequence; identical to SEQ ID NO: 1628
  Description of Artificial Sequence: Synthetic polynucleotide

SEQ ID NO: 1635 - protein, 106 aa, Artificial Sequence; identical to SEQ ID NO: 1629
  Description of Artificial Sequence: Synthetic polypeptide

SEQ ID NO: 1636 - protein, 8 aa, Artificial Sequence
  Description of Artificial Sequence: Synthetic peptide
LQRSSWLT

SEQ ID NO: 1637 - DNA, 358 bp, Artificial Sequence
  Description of Artificial Sequence: Synthetic polynucleotide
caggtgcagctggtgcagtctggggctgaggtgaagaagcctggggcctcagtgagggtttcctgcaaggcatctggatacaccttcagcacttactctatgcactgggtgcgacaggcccctggacaagggcttgaatggatgggaataatcaaccctagtggtggtagcacaagctacgcacagaggcttgagggcagagtcaccatgaccagggacacgtccacgagcacagtgtacatggagctgaccagcctgagatttgaggacacggccctgtattactgcacgagagatggcggcagtggctggtcctttgactcctggggccagggaaccctggtcaccgtctcctcag

SEQ ID NO: 1638 - protein, 119 aa, Artificial Sequence
  Description of Artificial Sequence: Synthetic polypeptide
QVQLVQSGAEVKKPGASVRVSCKASGYTFSTYSMHWVRQAPGQGLEWMGIINPSGGSTSYAQRLEGRVTMTRDTSTSTVYMELTSLRFEDTALYYCTRDGGSGWSFDSWGQGTLVTVSS

SEQ ID NO: 1639 - protein, 12 aa, Artificial Sequence
  Description of Artificial Sequence: Synthetic peptide
TRDGGSGWSFDS

SEQ ID NO: 1640 - DNA, 334 bp, Artificial Sequence
  Description of Artificial Sequence: Synthetic polynucleotide
gatattgtgatgactcagtctccactctccctgcccgtcacccctggagagccggcctccatctcctgcaggtctagtcagagcctcctgcacagtaatggaaacaactatttggattggtacctgcagaagccagggcagtctccacagctcctgatctatttgggttctaatcgggcctccggggtccctgacaggttcagtggcagtggatcaggcacagattttacactgaaaatcagcagagtggaggctgaggatgttggggtttattactgcatgcaagctcgaccaccattcactttcggccctgggaccaaagtggatttcaaac

SEQ ID NO: 1641 - protein, 111 aa, Artificial Sequence
  Description of Artificial Sequence: Synthetic polypeptide
DIVMTQSPLSLPVTPGEPASISCRSSQSLLHSNGNNYLDWYLQKPGQSPQLLIYLGSNRASGVPDRFSGSGSGTDFTLKISRVEAEDVGVYYCMQARPPFTFGPGTKVDFK

SEQ ID NO: 1642 - protein, 8 aa, Artificial Sequence
  Description of Artificial Sequence: Synthetic peptide
MQARPPFT

SEQ ID NO: 1643 - DNA, 382 bp, Artificial Sequence
  Description of Artificial Sequence: Synthetic polynucleotide
caggtgcagctgcaggagtcgggcccaggcctggtaaagccttcacagaccctgtccctcacctgcactgtctcaggtggctccatcaacagtggtgaattctactggacttggatccgccagcccccaggaaagggcctggagtggattggaaacgtctattacactgggagcgcctactacaacccgtccctcaagagtcgagtaacactatcaatagacacgtccaagaaggaattctccctgaaggtgacctctgtgactgccgcagacacggccgtatatttctgtgccagagcccgccgaaaagatttttggagtggttattggccacccggacttgacttctggggccagggaaccctggtcaccgtctcctcag

SEQ ID NO: 1644 - protein, 127 aa, Artificial Sequence
  Description of Artificial Sequence: Synthetic polypeptide
QVQLQESGPGLVKPSQTLSLTCTVSGGSINSGEFYWTWIRQPPGKGLEWIGNVYYTGSAYYNPSLKSRVTLSIDTSKKEFSLKVTSVTAADTAVYFCARARRKDFWSGYWPPGLDFWGQGTLVTVSS

SEQ ID NO: 1645 - protein, 19 aa, Artificial Sequence
  Description of Artificial Sequence: Synthetic peptide
ARARRKDFWSGYWPPGLDF

SEQ ID NO: 1646 - DNA, 323 bp, Artificial Sequence
  Description of Artificial Sequence: Synthetic polynucleotide
gacatccagatgacccagtctccatcctccctgtctgcatctgtaggagacagagtcaccatcacttgccaggcgagtcaggacattagtaactatttaaattggtatcaacagaaaccagggaaagcccctaagctcctgatctacgatgcatccaatttggaaacaggggtcccatcaaggttcagtggcagtggatctgggacagattttagtttcaccatcagcagcctgcagcctgaagatattgcaacatattactgtcaacagtatgataatttccgagtgttcactttcggcggggggaccaaggtggagatcaa

SEQ ID NO: 1647 - protein, 107 aa, Artificial Sequence
  Description of Artificial Sequence: Synthetic polypeptide
DIQMTQSPSSLSASVGDRVTITCQASQDISNYLNWYQQKPGKAPKLLIYDASNLETGVPSRFSGSGSGTDFSFTISSLQPEDIATYYCQQYDNFRVFTFGGGTKVEI

SEQ ID NO: 1648 - protein, 10 aa, Artificial Sequence
  Description of Artificial Sequence: Synthetic peptide
QQYDNFRVFT

SEQ ID NO: 1649 - DNA, 382 bp, Artificial Sequence
  Description of Artificial Sequence: Synthetic polynucleotide
gaagtgcagctggtgcagtccggagcagaggtgagaaagcccggggagtctctgaggatctcctgtaagggttctggagacatctttcccaggtcctcaatcagctgggtgcgccagacgcccgggaaaggcctggagtggatagggaagattgatcctcctgacccttatacatggtccagcccgtcctcttctacatactacaacccgtccttcgaaggccacgtcaccatctcagctgacaactccatcaacactgcctatctgcagtggcgcactttgcaggcctcggacaccgccatatattactgtgcgggacatctaagtggggatcccctttttgtctactgggcccagggaagcctggtcaccgtctcctcag

SEQ ID NO: 1650 - protein, 127 aa, Artificial Sequence
  Description of Artificial Sequence: Synthetic polypeptide
EVQLVQSGAEVRKPGESLRISCKGSGDIFPRSSISWVRQTPGKGLEWIGKIDPPDPYTWSSPSSSTYYNPSFEGHVTISADNSINTAYLQWRTLQASDTAIYYCAGHLSGDPLFVYWAQGSLVTVSS

SEQ ID NO: 1651 - protein, 12 aa, Artificial Sequence
  Description of Artificial Sequence: Synthetic peptide
AGHLSGDPLFVY

SEQ ID NO: 1652 - DNA, 322 bp, Artificial Sequence
  Description of Artificial Sequence: Synthetic polynucleotide
gaaatagtgatgacgcagtctccagccaccctgtctgtgtctccaggggaaagagccaccctctcctgcagggccagtcagagtgttggtaacaacttagcctggtaccagcagaaacctggccaggctcccaggctcctcatctctggtgcatccaccagagccactggtatcccagccaggttcagtggcagtgggtctgggacagagttcactctcaccatcagcatcctccagtctgaggatgttgcagtttattactgtcagcagtatgattggtggcctccgacgttcggccaagggaccaaggtggaagtcaaac

SEQ ID NO: 1653 - protein, 107 aa, Artificial Sequence
  Description of Artificial Sequence: Synthetic polypeptide
EIVMTQSPATLSVSPGERATLSCRASQSVGNNLAWYQQKPGQAPRLLISGASTRATGIPARFSGSGSGTEFTLTISILQSEDVAVYYCQQYDWWPPTFGQGTKVEVK

SEQ ID NO: 1654 - protein, 9 aa, Artificial Sequence
  Description of Artificial Sequence: Synthetic peptide
QQYDWWPPT

SEQ ID NO: 1655 - DNA, 352 bp, Artificial Sequence
  Description of Artificial Sequence: Synthetic polynucleotide
caggtgcagctggtgcagtctggggctgaggtgaagaagcctgggtcctcggtgaaggtctcctgcaaggcttctggaggcaccttcagcaactatcctatcaactgggtgcgacaggcccctggacaaggacttgagtggatgggagggatcatccctctctttggtacaccaaactacgcacagaaattccagggcagagtcacgattaccgcggacaaatccacgaacacagcctacatggaactgagcagcctgagatctgaggacacggccgtctatttctgtgcgagagatcaaccctatgccgtcgtggtctggggccagggaaccctggtcaccgtctcgtcag

SEQ ID NO: 1656 - protein, 117 aa, Artificial Sequence
  Description of Artificial Sequence: Synthetic polypeptide
QVQLVQSGAEVKKPGSSVKVSCKASGGTFSNYPINWVRQAPGQGLEWMGGIIPLFGTPNYAQKFQGRVTITADKSTNTAYMELSSLRSEDTAVYFCARDQPYAVVVWGQGTLVTVSS

SEQ ID NO: 1657 - protein, 10 aa, Artificial Sequence
  Description of Artificial Sequence: Synthetic peptide
ARDQPYAVVV

SEQ ID NO: 1658 - DNA, 322 bp, Artificial Sequence
  Description of Artificial Sequence: Synthetic polynucleotide
gacatccagatgacccagtctccatcctccctgtctgcctctgtaggagacagagtcaccatcacttgccaggcgagtcaggacattagcaactatttaaattggtatcagcagaaaccagggaaagcccctaagctcctgatctacgatgcatccaatttggaaacaggggtcccatcaaggttcagtggaagtggatctgggacagattttactttcaccatcagcagcctgcagcctgaagatattgcaacatactactgtcaacagtatgataacgtcgtcaggactttcggcggagggaccaaggtggagatcaaac

SEQ ID NO: 1659 - protein, 107 aa, Artificial Sequence
  Description of Artificial Sequence: Synthetic polypeptide
DIQMTQSPSSLSASVGDRVTITCQASQDISNYLNWYQQKPGKAPKLLIYDASNLETGVPSRFSGSGSGTDFTFTISSLQPEDIATYYCQQYDNVVRTFGGGTKVEIK

SEQ ID NO: 1660 - protein, 9 aa, Artificial Sequence
  Description of Artificial Sequence: Synthetic peptide
QQYDNVVRT

SEQ ID NO: 1661 - DNA, 355 bp, Artificial Sequence
  Description of Artificial Sequence: Synthetic polynucleotide
caggtgcagctggtgcagtctggggctgaggtgaagaagcctgggtcctcggtgaaggtctcctgcaaggcttctggaggcattttcagcaactatgttatcaactgggtgcgacaggcccctggacaagggcttgagtggatgggaggcatcatccctatctttggtacaacaaactacgcacagaagtttcagggcagagtcacgattaccgcggacaaatccacgaacacagcctacatggaggtgagcagcctgagatctgaagacacggccgtgtattactgtgcgagagagtttggatctacggggggccaatactggggccagggaaccctggtcaccgtctcctcag

SEQ ID NO: 1662 - protein, 118 aa, Artificial Sequence
  Description of Artificial Sequence: Synthetic polypeptide
QVQLVQSGAEVKKPGSSVKVSCKASGGIFSNYVINWVRQAPGQGLEWMGGIIPIFGTTNYAQKFQGRVTITADKSTNTAYMEVSSLRSEDTAVYYCAREFGSTGGQYWGQGTLVTVSS

SEQ ID NO: 1663 - protein, 11 aa, Artificial Sequence
  Description of Artificial Sequence: Synthetic peptide
AREFGSTGGQY

SEQ ID NO: 1664 - DNA, 325 bp, Artificial Sequence
  Description of Artificial Sequence: Synthetic polynucleotide
gacatccagatgacccagtctccatcctccctgtctgcatctgtaggagacagagtcaccatcacttgccaggcgagtcaggacattagcaactatttaaattggtatcagcagaaaccagggaaagcccctaagctcctgatctacgatgcatccaatttggaaacaggggtcccatcaaggttcagtggaagtggatctgggacagattttactttcaccatcagcagcctgcaacctgaagatattgcaacatattactgtcaacagtatgataatctcccttcgcttactttcggccctgggaccacagtggatatcaaac

SEQ ID NO: 1665 - protein, 108 aa, Artificial Sequence
  Description of Artificial Sequence: Synthetic polypeptide
DIQMTQSPSSLSASVGDRVTITCQASQDISNYLNWYQQKPGKAPKLLIYDASNLETGVPSRFSGSGSGTDFTFTISSLQPEDIATYYCQQYDNLPSLTFGPGTTVDIK

SEQ ID NO: 1666 - protein, 10 aa, Artificial Sequence
  Description of Artificial Sequence: Synthetic peptide
QQYDNLPSLT

SEQ ID NO: 1667 - DNA, 358 bp, Artificial Sequence
  Description of Artificial Sequence: Synthetic polynucleotide
caggtgcagctggtgcagtctggggctgaggtgaagaagcctgggtcctcggtgaaggtctcctgcaagtcttctggaggcaccttcaacacctatgctatcaactgggtgcgacaggcccctggacaggggcttgagtggatgggagggctcatccctgtctttggtacagcaaactacgcacagaagttccaggacagagtcacgattaccgcggacacatcaacgaccacagcctacatggagctgaatagcctgacatctgaggacacggccgtgtattactgtgcgagagatggaggggctatagcaggtcttgactcctggggccagggaaccctggtcaccgtctcctcag

SEQ ID NO: 1668 - protein, 119 aa, Artificial Sequence
  Description of Artificial Sequence: Synthetic polypeptide
QVQLVQSGAEVKKPGSSVKVSCKSSGGTFNTYAINWVRQAPGQGLEWMGGLIPVFGTANYAQKFQDRVTITADTSTTTAYMELNSLTSEDTAVYYCARDGGAIAGLDSWGQGTLVTVSS

SEQ ID NO: 1669 - protein, 12 aa, Artificial Sequence
  Description of Artificial Sequence: Synthetic peptide
ARDGGAIAGLDS

SEQ ID NO: 1670 - DNA, 337 bp, Artificial Sequence
  Description of Artificial Sequence: Synthetic polynucleotide
gatattgtgatgacccagactccactctctctgtccgtcacccctggacagtcggcctccatctcctgcaagtctagtcagagcctcctgcatagagatgggcagacctatttatattggtacctgcagaagccaggccagcctccacagctcctgatctatgaggtttccaaccggttctctggagtgccagataggttcagtggcagcgggtcagggacagatttcacactgaaaatcagccgggtggaggctgacgatgttggggtttattactgcatgcaaaatatacagcttccgctcactttcggcggagggaccaaggtggagatcaaac

SEQ ID NO: 1671 - protein, 112 aa, Artificial Sequence
  Description of Artificial Sequence: Synthetic polypeptide
DIVMTQTPLSLSVTPGQSASISCKSSQSLLHRDGQTYLYWYLQKPGQPPQLLIYEVSNRFSGVPDRFSGSGSGTDFTLKISRVEADDVGVYYCMQNIQLPLTFGGGTKVEIK

SEQ ID NO: 1672 - protein, 9 aa, Artificial Sequence
  Description of Artificial Sequence: Synthetic peptide
MQNIQLPLT

SEQ ID NO: 1673 - DNA, 367 bp, Artificial Sequence
  Description of Artificial Sequence: Synthetic polynucleotide
caggtgcagctggtgcagtctggggctgaggtgaagaagcctggggcctcagtgaaggtttcctgcaagacatctggatacattctcaccagctactatatgcactgggtgcgacaggcccctggacacggacttgagtggatgggaattatcaaccctagtggtggtagcacaagctacgcacagaagttccagggcagagtcaccatgaccagggacacgtccacgagcacagtctacatggagctgagcagcctgagatctgaggacacggccgtgtattactgtgcgagagccacccaaaaggatcgcagaggctggctgtttgactcctggggccagggaaccctggtcaccgtctcctcag

SEQ ID NO: 1674 - protein, 122 aa, Artificial Sequence
  Description of Artificial Sequence: Synthetic polypeptide
QVQLVQSGAEVKKPGASVKVSCKTSGYILTSYYMHWVRQAPGHGLEWMGIINPSGGSTSYAQKFQGRVTMTRDTSTSTVYMELSSLRSEDTAVYYCARATQKDRRGWLFDSWGQGTLVTVSS

SEQ ID NO: 1675 - protein, 15 aa, Artificial Sequence
  Description of Artificial Sequence: Synthetic peptide
ARATQKDRRGWLFDS

SEQ ID NO: 1676 - DNA, 310 bp, Artificial Sequence
  Description of Artificial Sequence: Synthetic polynucleotide
gaaatagtgatgacgcagtctccagccaccctgtctgtgtctccaggggaaagagccaccctctcctgcagggccagtcagagtgttagcagcaacttagcctggtatcagcaaaaacctggccaggctcccaggctcctcatctatggtgcatccaccagggccactggtatcccagccaggttcagtggcagtgggtctgggacagagttcactctcaccatcagcggcctgcagtctgaagattttgcagtttattactgtcagcacttcgggacttttggccaggggaccaagctggagatcaaac

SEQ ID NO: 1677 - protein, 103 aa, Artificial Sequence
  Description of Artificial Sequence: Synthetic polypeptide
EIVMTQSPATLSVSPGERATLSCRASQSVSSNLAWYQQKPGQAPRLLIYGASTRATGIPARFSGSGSGTEFTLTISGLQSEDFAVYYCQHFGTFGQGTKLEIK

SEQ ID NO: 1678 - protein, 5 aa, Artificial Sequence
  Description of Artificial Sequence: Synthetic peptide
QHFGT

SEQ ID NO: 1679 - DNA, 353 bp, Artificial Sequence
  Description of Artificial Sequence: Synthetic polynucleotide
caggtgcagctggtgcagtctggggctgaggtgaagaagcctgggtccgcggtgagggtctcctgcaaggcttctggaggcatcttcagtcactatggtatcagctgggtgcgacaggtcccaggacaagggcttgagtggatgggagggatcattcctgcctttggtacaccaaattacgcacggaagttccagggcagactcacggttaccgcggacaaagccacgagcacagcctacatggacctgaggagtctgagatctgaggacacggccgtgtattactgtgcgagagagtacggatcaacggggggccaatactggggccagggaaccctggtcatcgtctcctc

SEQ ID NO: 1680 - protein, 117 aa, Artificial Sequence
  Description of Artificial Sequence: Synthetic polypeptide
QVQLVQSGAEVKKPGSAVRVSCKASGGIFSHYGISWVRQVPGQGLEWMGGIIPAFGTPNYARKFQGRLTVTADKATSTAYMDLRSLRSEDTAVYYCAREYGSTGGQYWGQGTLVIVS

SEQ ID NO: 1681 - protein, 11 aa, Artificial Sequence
  Description of Artificial Sequence: Synthetic peptide
AREYGSTGGQY

SEQ ID NO: 1682 - DNA, 325 bp, Artificial Sequence
  Description of Artificial Sequence: Synthetic polynucleotide
gacatccagatgacccagtctccatcctccctgtctgcatctgtgggagacagagtcaccatcacttgccaggcgagtcaagacattaacacctatttaaattggtatcagcagaaaccagggaaaccccctaagctcctgatctacgatgcatccaatttggaaacaggggtcacatcgaggttcagtggaagtggatctgggacagattttactttcaccatcagcagcctgcagcctgaagatattgcaacatattactgtcaacaatatgatagtctcccttcgcatactttcggccctgggaccaaagtggatatcaaac

SEQ ID NO: 1683 - protein, 108 aa, Artificial Sequence
  Description of Artificial Sequence: Synthetic polypeptide
DIQMTQSPSSLSASVGDRVTITCQASQDINTYLNWYQQKPGKPPKLLIYDASNLETGVTSRFSGSGSGTDFTFTISSLQPEDIATYYCQQYDSLPSHTFGPGTKVDIK

SEQ ID NO: 1684 - protein, 10 aa, Artificial Sequence
  Description of Artificial Sequence: Synthetic peptide
QQYDSLPSHT

SEQ ID NO: 1685 - DNA, 364 bp, Artificial Sequence
  Description of Artificial Sequence: Synthetic polynucleotide
caggtgcagctgcaggagtcgggcccaggactggtgaagccttcggagaccctgtccctcacctgcactgtctctggtggctccatcagtacttactactggacctggatccggcagcccccagggaagggactggagtggattgggtatcgctattaccatgggagcaccaactacaacccctccctcaagagtcgagtcaccatatcagtggacacgtccaagaaccagttctccctgaagctgagctctgtgaccgccgcagacacggccgtgtattactgtacgagacgcgtttttggtgggagttacgcgcattggttcgacccctggggccagggaaccctggtcaccgtctcctcag

SEQ ID NO: 1686 - protein, 121 aa, Artificial Sequence
  Description of Artificial Sequence: Synthetic polypeptide
QVQLQESGPGLVKPSETLSLTCTVSGGSISTYYWTWIRQPPGKGLEWIGYRYYHGSTNYNPSLKSRVTISVDTSKNQFSLKLSSVTAADTAVYYCTRRVFGGSYAHWFDPWGQGTLVTVSS

SEQ ID NO: 1687 - protein, 15 aa, Artificial Sequence
  Description of Artificial Sequence: Synthetic peptide
TRRVFGGSYAHWFDP

SEQ ID NO: 1688 - DNA, 325 bp, Artificial Sequence
  Description of Artificial Sequence: Synthetic polynucleotide
tcctatgtgctgactcagccaccctcggtgtcagtggccccaggacagacggccaggattagctgtgggggcaacaacattggaagtaaaagtgtgcactggtaccagcagaagccaggccaggcccctgtactggtcgtctatgataataccgaccggccctcagggatccctgagcgattctctggctccaactctgggaacacggccaccctgaccatcagcagggtcgaagccggggatgaggccgactattactgtcaggtgtgggatagtagtagtgatcagggtgtattcggcggagggaccaagctgaccgtcctag

SEQ ID NO: 1689 - protein, 108 aa, Artificial Sequence
  Description of Artificial Sequence: Synthetic polypeptide
SYVLTQPPSVSVAPGQTARISCGGNNIGSKSVHWYQQKPGQAPVLVVYDNTDRPSGIPERFSGSNSGNTATLTISRVEAGDEADYYCQVWDSSSDQGVFGGGTKLTVL

SEQ ID NO: 1690 - protein, 11 aa, Artificial Sequence
  Description of Artificial Sequence: Synthetic peptide
QVWDSSSDQGV

SEQ ID NO: 1691 - DNA, 384 bp, Artificial Sequence
  Description of Artificial Sequence: Synthetic polynucleotide
gaagtgcagctggtgcagtccggagcagaggtgaaaaagcccggggagtctctgaggatctcctgtaaggcttctggatacagctttaccagctactggatcagctgggtgcgccaggtgcccgggaaaggcctggagtggatggggaggattgatcctagtgactcttataccaagtacagtccgtccttccaaggccacgtcaccatctcagctgacaagtccatcagcactgcctacctgcagtggagcagcctgaaggcctcggacaccgccatgtattactgtgcgagacagggagcctctgatggtagtgattattacgccgcatactactacgctgtggacgtctggggccaagggaccatggtcaccgtctcctca

SEQ ID NO: 1692 - protein, 128 aa, Artificial Sequence
  Description of Artificial Sequence: Synthetic polypeptide
EVQLVQSGAEVKKPGESLRISCKASGYSFTSYWISWVRQVPGKGLEWMGRIDPSDSYTKYSPSFQGHVTISADKSISTAYLQWSSLKASDTAMYYCARQGASDGSDYYAAYYYAVDVWGQGTMVTVSS

SEQ ID NO: 1693 - protein, 21 aa, Artificial Sequence
  Description of Artificial Sequence: Synthetic peptide
ARQGASDGSDYYAAYYYAVDV

SEQ ID NO: 1694 - DNA, 333 bp, Artificial Sequence
  Description of Artificial Sequence: Synthetic polynucleotide
cagtctgtgctgactcagcctccctccgcgtccgggtctcctggacagtcagtcaccatctcctgcactggaaccagcagtgacgttggtggttttaactttgtctcctggtaccaacagcacccaggcaaagcccccaaactcgtgatttatgaggtcactaagcggccctcaggggtccctgatcgcttctctggctccaagtctggcaacacggcctccctgaccgtctctgggctccaggctgaggatgaggctgattattactgcagctcctatgcaggcagcaacattggagatgtcttcggaactgggaccaaggtcaccgtccta

SEQ ID NO: 1695 - protein, 111 aa, Artificial Sequence
  Description of Artificial Sequence: Synthetic polypeptide
QSVLTQPPSASGSPGQSVTISCTGTSSDVGGFNFVSWYQQHPGKAPKLVIYEVTKRPSGVPDRFSGSKSGNTASLTVSGLQAEDEADYYCSSYAGSNIGDVFGTGTKVTVL

SEQ ID NO: 1696 - protein, 11 aa, Artificial Sequence
  Description of Artificial Sequence: Synthetic peptide
SSYAGSNIGDV

SEQ ID NO: 1697 - DNA, 357 bp, Artificial Sequence
  Description of Artificial Sequence: Synthetic polynucleotide
caggtgcagctggtggagtctgggggaggcgtggtccagcctgggaggtccctgagactctcctgtgcagcgtctggattcaccttcagtaactatggcatgcactgggtccgccaggctccaggcaaggggctggagtgggtggcagttatatggtatgatggaagtaataaattttatgcagactccgagcgattcaccatctccagagacaattccaagaacacgctgtatctgcaaatgaacagcctgagagccgaggacacggctgtgtattactgtgcgaagggctacagtcctaactactactacggtatggacgtctggggccaagggaccacggtcaccgtctcctca

SEQ ID NO: 1698 - protein, 119 aa, Artificial Sequence
  Description of Artificial Sequence: Synthetic polypeptide
QVQLVESGGGVVQPGRSLRLSCAASGFTFSNYGMHWVRQAPGKGLEWVAVIWYDGSNKFYADSERFTISRDNSKNTLYLQMNSLRAEDTAVYYCAKGYSPNYYYGMDVWGQGTTVTVSS

SEQ ID NO: 1699 - protein, 14 aa, Artificial Sequence
  Description of Artificial Sequence: Synthetic peptide
AKGYSPNYYYGMDV

SEQ ID NO: 1700 - DNA, 334 bp, Artificial Sequence
  Description of Artificial Sequence: Synthetic polynucleotide
cagtctgtgctgactcagccgccctcagtgtctggggccccagggcagagggtcaccatctcctgcactgggagcagctccaacatcggggcaggttatgatgtacagtggtaccagcagcttccaggaacagcccccaaactcctcatctatggtaacagcaatcggccctcaggggtccctgatcgattctctggctccaagtctggcacctcagcctccctggccatcactgggctccaggctgaggatgaggctgattattactgtcagtcctatgacagcagcctgagtgcttatgtcttcggaactgggaccaaggtcaccgtcctag

SEQ ID NO: 1701 - protein, 111 aa, Artificial Sequence
  Description of Artificial Sequence: Synthetic polypeptide
QSVLTQPPSVSGAPGQRVTISCTGSSSNIGAGYDVQWYQQLPGTAPKLLIYGNSNRPSGVPDRFSGSKSGTSASLAITGLQAEDEADYYCQSYDSSLSAYVFGTGTKVTVL

SEQ ID NO: 1702 - protein, 11 aa, Artificial Sequence
  Description of Artificial Sequence: Synthetic peptide
QSYDSSLSAYV

SEQ ID NO: 1703 - DNA, 375 bp, Artificial Sequence
  Description of Artificial Sequence: Synthetic polynucleotide
caggtccagcttgtgcagtctgggactgaggtgaagaagcctggggcctcagtgaaggtttcctgtaaggcttctggatacaccttcactaactctgctatgcattgggtgcgccaggcccccggacaaaggcttgagtggatgggatggatcaaccctgacactggtaacacacaatattcacagaagttccagggcagagtcaccattaccagggacacatccgcgagcacagcctacatggagctgagcagcctgagatccgaagacacggctgtgtattactgtgcgagcggttcggggagtttgggcctctcttattactactacggtatggacgtctggggccaagggaccacggtcaccgtctcctca

SEQ ID NO: 1704 - protein, 125 aa, Artificial Sequence
  Description of Artificial Sequence: Synthetic polypeptide
QVQLVQSGTEVKKPGASVKVSCKASGYTFTNSAMHWVRQAPGQRLEWMGWINPDTGNTQYSQKFQGRVTITRDTSASTAYMELSSLRSEDTAVYYCASGSGSLGLSYYYYGMDVWGQGTTVTVSS

SEQ ID NO: 1705 - protein, 18 aa, Artificial Sequence
  Description of Artificial Sequence: Synthetic peptide
ASGSGSLGLSYYYYGMDV

SEQ ID NO: 1706 - DNA, 337 bp, Artificial Sequence
  Description of Artificial Sequence: Synthetic polynucleotide
cagtctgtgctgactcagccgccctcagtgtctggggccccagggcagagggtcaccatctcctgcactgggagcagctccaacatcggggcaggttatgatgtacactggtaccagcagcttccaggaacagcccccaaactcctcatctttagtgtcagcaatcggccctcaggggtccctgaccgattctctggctccaagtctggcacctcagcctccctggccatcactgggctccaggctgaggatgaggctgattattactgccagtcctatgacagcaggctgagtgccctcgtggtattcggcggagggaccaagctgaccgtcctag

SEQ ID NO: 1707 - protein, 112 aa, Artificial Sequence
  Description of Artificial Sequence: Synthetic polypeptide
QSVLTQPPSVSGAPGQRVTISCTGSSSNIGAGYDVHWYQQLPGTAPKLLIFSVSNRPSGVPDRFSGSKSGTSASLAITGLQAEDEADYYCQSYDSRLSALVVFGGGTKLTVL

SEQ ID NO: 1708 - protein, 12 aa, Artificial Sequence
  Description of Artificial Sequence: Synthetic peptide
QSYDSRLSALVV

SEQ ID NO: 1709 - DNA, 355 bp, Artificial Sequence
  Description of Artificial Sequence: Synthetic polynucleotide
caggtgcagctgcaggagtcgggcccaggactggtgaagtcttcggagaccctgtccctcaattgcactgtctctggtggctccttcagtcctttctactggagctggatccggcagcccccagggaagggactggagtggattggctatatctattacactgggaccacgaattacaacccctccctcaagagtcgagtcaccatctcagtagacacgtccaacaaccagttctccctgaacctgagctctgtgaccgctgcggacacggccgtgtattactgtgcgagaggttggacgggaatagctgaatttgactactggggccagggaaccctggtcgccgtctcctcag

SEQ ID NO: 1710 - protein, 118 aa, Artificial Sequence
  Description of Artificial Sequence: Synthetic polypeptide
QVQLQESGPGLVKSSETLSLNCTVSGGSFSPFYWSWIRQPPGKGLEWIGYIYYTGTTNYNPSLKSRVTISVDTSNNQFSLNLSSVTAADTAVYYCARGWTGIAEFDYWGQGTLVAVSS

SEQ ID NO: 1711 - protein, 12 aa, Artificial Sequence
  Description of Artificial Sequence: Synthetic peptide
ARGWTGIAEFDY

SEQ ID NO: 1712 - DNA, 330 bp, Artificial Sequence
  Description of Artificial Sequence: Synthetic polynucleotide
cagtctgccctgactcagcctgcctccgtgtctgggtctcctggacagtcgatcaccatctcctgcactggaaccagcaatgacgttggtggttttaacttggtctcctggtaccaacaatacccaggcaaagcccccaaactcatgatttatgaggtcagtaatcggccctcaggggtttctcatcgcttctctggctccaagtctggcaacacggcctccctgaccatctctgggctccaggctgaggacgaggctgattattactgcagctcatttacaatcattcgcactctcttattcggcggagggaccaagctgaccgtccta

SEQ ID NO: 1713 - protein, 110 aa, Artificial Sequence
  Description of Artificial Sequence: Synthetic polypeptide
QSALTQPASVSGSPGQSITISCTGTSNDVGGFNLVSWYQQYPGKAPKLMIYEVSNRPSGVSHRFSGSKSGNTASLTISGLQAEDEADYYCSSFTIIRTLLFGGGTKLTVL

SEQ ID NO: 1714 - protein, 10 aa, Artificial Sequence
  Description of Artificial Sequence: Synthetic peptide
SSFTIIRTLL

SEQ ID NO: 1715 - DNA, 352 bp, Artificial Sequence
  Description of Artificial Sequence: Synthetic polynucleotide
caggtgcagctggtgcagtctggggctgaggtgaagaagcctggggcctcagtgaaggtttcttgcaagacatctggatacaccttcgcccacttctatatttattgggtgcgacaggcccctggacaagggcttgagtgtatgggagtaatcaaccctagtggtggtagcccatcctacgcacagaagttccagggcagagtcaccatgaccagcgacacgtccacgagtacattctacatggagttgaccggcctgacatctgaggacacggccgtctattactgtgcgagagggtgggcaggcccctttgactactggggccaggggaccctggtcaccgtctcctcag

SEQ ID NO: 1716 - protein, 117 aa, Artificial Sequence
  Description of Artificial Sequence: Synthetic polypeptide
QVQLVQSGAEVKKPGASVKVSCKTSGYTFAHFYIYWVRQAPGQGLECMGVINPSGGSPSYAQKFQGRVTMTSDTSTSTFYMELTGLTSEDTAVYYCARGWAGPFDYWGQGTLVTVSS

SEQ ID NO: 1717 - protein, 10 aa, Artificial Sequence
  Description of Artificial Sequence: Synthetic peptide
ARGWAGPFDY

SEQ ID NO: 1718 - DNA, 323 bp, Artificial Sequence
  Description of Artificial Sequence: Synthetic polynucleotide
tcctatgtgctgactcagccaccctcggtgtcagtggccccgggacagacggccaggattacctgtgggggcaacaacattggaagtaaaagagtgcactggtaccagcagaagccaggccaggcccctgtgctggtcgtctatgatgatagcgaccggccctcagggatccctgagcgattctctggctccaactctgggaacacggccaccctgaccatcagcagggtcgaagccggggatgaggccgactatcactgtcatgtgtacgatagtagtagtgatcatcgagtcttcggaactgggaccaaggtcaccgtcct

SEQ ID NO: 1719 - protein, 107 aa, Artificial Sequence
  Description of Artificial Sequence: Synthetic polypeptide
SYVLTQPPSVSVAPGQTARITCGGNNIGSKRVHWYQQKPGQAPVLVVYDDSDRPSGIPERFSGSNSGNTATLTISRVEAGDEADYHCHVYDSSSDHRVFGTGTKVTV

SEQ ID NO: 1720 - protein, 11 aa, Artificial Sequence
  Description of Artificial Sequence: Synthetic peptide
HVYDSSSDHRV

SEQ ID NO: 1721 - DNA, 376 bp, Artificial Sequence
  Description of Artificial Sequence: Synthetic polynucleotide
caggtgcagctggtgcagtctggggctgaggtgaagaagcctggggcctcagtgaaggtctcctgtaaggcttctggatacaccttctccgactactctatgcactgggtgcgacaggcccctggacaagggcttgagtggatgggatggatcatcgctaacagtggtgacacaaactatgcacagaagtttcagggcagggtcaccatgaccagggacacgtccatcagcacagcctacatggagctgagcaggctgagacctgacgacacggccgtgtattactgtgcgagtccccttagagattcacagtggcatggggcatatgggtactttgactactggggccagggaaccctggtcaccgtctcctcag

SEQ ID NO: 1722 - protein, 125 aa, Artificial Sequence
  Description of Artificial Sequence: Synthetic polypeptide
QVQLVQSGAEVKKPGASVKVSCKASGYTFSDYSMHWVRQAPGQGLEWMGWIIANSGDTNYAQKFQGRVTMTRDTSISTAYMELSRLRPDDTAVYYCASPLRDSQWHGAYGYFDYWGQGTLVTVSS

SEQ ID NO: 1723 - protein, 18 aa, Artificial Sequence
  Description of Artificial Sequence: Synthetic peptide
ASPLRDSQWHGAYGYFDY

SEQ ID NO: 1724 - DNA, 346 bp, Artificial Sequence
  Description of Artificial Sequence: Synthetic polynucleotide
cagcctgtgctgactcagccaccttcctcctccgcatctcctggagaatccgccagactcacctgcaccttgcccagtgacatcaatgttactaggtacaacatatactggtaccagcagaagccagggagccctcccaggtatgtcctgtactactactcagactcagataagggccagggctctggagtccccagccgcttttctggatccaaagatgcttcagccaatacagggattttactcatctccgggctccagtctgaggatgaggctgactattactgtatgatttggccaagcattgaaggagtgttcggcggagggaccaagctgaccgtcctag

SEQ ID NO: 1725 - protein, 115 aa, Artificial Sequence
  Description of Artificial Sequence: Synthetic polypeptide
QPVLTQPPSSSASPGESARLTCTLPSDINVTRYNIYWYQQKPGSPPRYVLYYYSDSDKGQGSGVPSRFSGSKDASANTGILLISGLQSEDEADYYCMIWPSIEGVFGGGTKLTVL

SEQ ID NO: 1726 - protein, 9 aa, Artificial Sequence
  Description of Artificial Sequence: Synthetic peptide
MIWPSIEGV

SEQ ID NO: 1727 - DNA, 361 bp, Artificial Sequence
  Description of Artificial Sequence: Synthetic polynucleotide
caggtgcagctggtggagtctgggggaggcgtggtccagcctgggcggtccctgagactctcctgtgcagcctctggattcaccttttatagttatggccttcactgggtccgccaggccccaggcaaggggctggagtgggtggcacttatttcatatgatggaacttataagttctattcagactccgtgaagggccgattcaccatctccagagacaattccaagaatacgatgtttctgcaaatgaacagcctcagaggtgaagacacggctgtctattactgtgcgaaggttgggggagcagtggctggtctgcttgactcctggggccagggaaccctggtcaccgtctcctcag

SEQ ID NO: 1728 - protein, 120 aa, Artificial Sequence
  Description of Artificial Sequence: Synthetic polypeptide
QVQLVESGGGVVQPGRSLRLSCAASGFTFYSYGLHWVRQAPGKGLEWVALISYDGTYKFYSDSVKGRFTISRDNSKNTMFLQMNSLRGEDTAVYYCAKVGGAVAGLLDSWGQGTLVTVSS

SEQ ID NO: 1729 - protein, 13 aa, Artificial Sequence
  Description of Artificial Sequence: Synthetic peptide
AKVGGAVAGLLDS

SEQ ID NO: 1730 - DNA, 334 bp, Artificial Sequence
  Description of Artificial Sequence: Synthetic polynucleotide
cagcttgtgctgactcagtcgccctctgcctctgcctccctgggagcctcggtcaaactcacctgcactctgagcagtgggcacagcggctatgtcatcgcctggcatcagcagcagccagacaaaaggcctcgatatttgatgaatcttaacagtgatggcagccacaccaagggggacgggatcccagatcgcttctcaggctccagctctggggctgaccgttaccttaccatctccagcctccagtctgaggatgaggctgactattactgtcagacctgggacactggctctgtggtcttcggcggagggaccaagctgaccgtcctag

SEQ ID NO: 1731 - protein, 111 aa, Artificial Sequence
  Description of Artificial Sequence: Synthetic polypeptide
QLVLTQSPSASASLGASVKLTCTLSSGHSGYVIAWHQQQPDKRPRYLMNLNSDGSHTKGDGIPDRFSGSSSGADRYLTISSLQSEDEADYYCQTWDTGSVVFGGGTKLTVL

SEQ ID NO: 1732 - protein, 9 aa, Artificial Sequence
  Description of Artificial Sequence: Synthetic peptide
QTWDTGSVV

SEQ ID NO: 1733 - DNA, 384 bp, Artificial Sequence
  Description of Artificial Sequence: Synthetic polynucleotide
gaggtgcagctgttggagtctgggggaggcttggtacagcctggggggtccctgagactctcctgtgcagcctctggattcccctttgatatctatgccatgaactgggtccgccaggctccagggaaggggctggagtgggtctcagggatcagtcgtaggagtggtagcacagagtacgccgactccgtgaagggccggttcaccatctccagagacaattccaagaatacgctgtatctgcaaatgaacagcctgagagccgaggacacggccagatattactgtgcgaaatgtaaggcgggtgatagtcgtggtgatgacccctactattactacggtattgatgtctggggccaagggaccacggtcaccgtctcctca

SEQ ID NO: 1734 - protein, 128 aa, Artificial Sequence
  Description of Artificial Sequence: Synthetic polypeptide
EVQLLESGGGLVQPGGSLRLSCAASGFPFDIYAMNWVRQAPGKGLEWVSGISRRSGSTEYADSVKGRFTISRDNSKNTLYLQMNSLRAEDTARYYCAKCKAGDSRGDDPYYYYGIDVWGQGTTVTVSS

SEQ ID NO: 1735 - protein, 21 aa, Artificial Sequence
  Description of Artificial Sequence: Synthetic peptide
AKCKAGDSRGDDPYYYYGIDV

SEQ ID NO: 1736 - DNA, 326 bp, Artificial Sequence
  Description of Artificial Sequence: Synthetic polynucleotide
aattttatgctgactcagccgcactctgtgtcggagtctccggggaagacggtaaccatctcctgcacccgctccagtggcagcattgccagcaactatgtgcagtggtaccaacaacgcccgggcagtgcccccaccattgtgatctatgaggattaccaaagaccctctggggtccctgatcgattctctggctccatcgacagttcctccaactctgcctccctcaccatctctggactgaagactgacgacgaggctgactactactgtcagtcttatgataccactatcgtgttcggcggagggaccaagctgaccgtcct

SEQ ID NO: 1737 - protein, 108 aa, Artificial Sequence
  Description of Artificial Sequence: Synthetic polypeptide
NFMLTQPHSVSESPGKTVTISCTRSSGSIASNYVQWYQQRPGSAPTIVIYEDYQRPSGVPDRFSGSIDSSSNSASLTISGLKTDDEADYYCQSYDTTIVFGGGTKLTV

SEQ ID NO: 1738 - protein, 8 aa, Artificial Sequence
  Description of Artificial Sequence: Synthetic peptide
QSYDTTIV

SEQ ID NO: 1739 - DNA, 361 bp, Artificial Sequence
  Description of Artificial Sequence: Synthetic polynucleotide
gaggtgcagctggtgcagtctggagcagaagtgaaaaagtcgggggagtctctgaagatctcctgtaggggatctggatacaggtttaccaactactggatcggctgggtgcgccagatgcccgggaaaggcctggagtggatggggatcgtctatcctggtgactcttatgtcagatacagcccgtccttccaaggccaggtcaccatctcagccgacaagtccatcaccaccgcctacctgcagtggagcagcctgaaggcctcggacaccgccatgtattactgtgcgggctactacggtggtaactccggctcttttgactactggggccagggaaccctggtcaccgtctcctcag

SEQ ID NO: 1740 - protein, 120 aa, Artificial Sequence
  Description of Artificial Sequence: Synthetic polypeptide
EVQLVQSGAEVKKSGESLKISCRGSGYRFTNYWIGWVRQMPGKGLEWMGIVYPGDSYVRYSPSFQGQVTISADKSITTAYLQWSSLKASDTAMYYCAGYYGGNSGSFDYWGQGTLVTVSS

SEQ ID NO: 1741 - protein, 13 aa, Artificial Sequence
  Description of Artificial Sequence: Synthetic peptide
AGYYGGNSGSFDY

SEQ ID NO: 1742 - DNA, 327 bp, Artificial Sequence
  Description of Artificial Sequence: Synthetic polynucleotide
tcctatgtgctgactcagccaccctcggtgtcagtggccccaggacagacggccaggattatttgtgggggaaacaatattgcaacttacagtgttcactggtaccagcagaagccaggccaggcccctgtcctggtcgtccgtgatgagaacgaccggccctcagggatccctgagcgattctctggctccaagtctgggaacacggccaccctgaccatcagcagggtcgaagccggggatgaggccgactactattgtcaggtgtgggatagtagtcttaatcctcttcatgtcttcggaactgggaccaaggtcaccgtccta

SEQ ID NO: 1743 - protein, 109 aa, Artificial Sequence
  Description of Artificial Sequence: Synthetic polypeptide
SYVLTQPPSVSVAPGQTARIICGGNNIATYSVHWYQQKPGQAPVLVVRDENDRPSGIPERFSGSKSGNTATLTISRVEAGDEADYYCQVWDSSLNPLHVFGTGTKVTVL

SEQ ID NO: 1744 - protein, 12 aa, Artificial Sequence
  Description of Artificial Sequence: Synthetic peptide
QVWDSSLNPLHV

SEQ ID NO: 1745 - DNA, 359 bp, Artificial Sequence
  Description of Artificial Sequence: Synthetic polynucleotide
gaggtgcagctggtggagtctgggggagccttggtacagcctgaggggtccctgagactctcctgtgcaggctctggattcaccttcgcttcctatgccatgaactgggtccgccaggctccagggaaggggctggagtgggtttcctacattagtagtggtagtactgacatatactacgcagactctgtgcagggccgattcaccatctccagagacgatgccaagaactcgctgtatctgcaaatgaacagcctgagagtcgaggacacggctgtgtattactgtgcgaccaatctagcggcagcttactcctactttgactcctggggccagggaaccctggtcaccgtctcctc

SEQ ID NO: 1746 - protein, 119 aa, Artificial Sequence
  Description of Artificial Sequence: Synthetic polypeptide
EVQLVESGGALVQPEGSLRLSCAGSGFTFASYAMNWVRQAPGKGLEWVSYISSGSTDIYYADSVQGRFTISRDDAKNSLYLQMNSLRVEDTAVYYCATNLAAAYSYFDSWGQGTLVTVS

SEQ ID NO: 1747 - protein, 13 aa, Artificial Sequence
  Description of Artificial Sequence: Synthetic peptide
ATNLAAAYSYFDS

SEQ ID NO: 1748 - DNA, 308 bp, Artificial Sequence
  Description of Artificial Sequence: Synthetic polynucleotide
cagtctgtgctgactcagccgccctcagcatctggggcccccgggcagagggtcaccatctcctgcactgggagcagctccaacatcggggcgggttattatgtatcctggtaccagcagttcccaggaacagcccccaaactcctcatctatgaaaatgataagcgaccctcaggggtttctgaccgattctctggctccaagtctggtacctcagcctccctgaccatcactggactccaatctgaggatgaggccgattattactgctcagcatgggatagcagcctgagtactcgcttattcgg

SEQ ID NO: 1749 - protein, 102 aa, Artificial Sequence
  Description of Artificial Sequence: Synthetic polypeptide
QSVLTQPPSASGAPGQRVTISCTGSSSNIGAGYYVSWYQQFPGTAPKLLIYENDKRPSGVSDRFSGSKSGTSASLTITGLQSEDEADYYCSAWDSSLSTRLF

SEQ ID NO: 1750 - protein, 11 aa, Artificial Sequence
  Description of Artificial Sequence: Synthetic peptide
SAWDSSLSTRL

SEQ ID NO: 1751 - DNA, 373 bp, Artificial Sequence
  Description of Artificial Sequence: Synthetic polynucleotide
gaggtgcagctggtggagtctgggggagggttggtccagcctggggggtccctgacactctcctgtgcagcctctggattcacctttagcacctttgccatgagttgggtccgccaggctccagggaaggggctggagtgggtctccggcattagtggaagtggaacttactcatactacgcagactccgtgaagggccggttcaccatctccagagacaatttcaagaacttagtgtttctgcaaatgaacagcctgagagccgaggacacggccgtctattactgtgtgaaagattcaaattattggagtggttttgtgattcaattttttgactactggggccagggagccctggtcagtgtctcctcag

SEQ ID NO: 1752 - protein, 124 aa, Artificial Sequence
  Description of Artificial Sequence: Synthetic polypeptide
EVQLVESGGGLVQPGGSLTLSCAASGFTFSTFAMSWVRQAPGKGLEWVSGISGSGTYSYYADSVKGRFTISRDNFKNLVFLQMNSLRAEDTAVYYCVKDSNYWSGFVIQFFDYWGQGALVSVSS

SEQ ID NO: 1753 - protein, 17 aa, Artificial Sequence
  Description of Artificial Sequence: Synthetic peptide
VKDSNYWSGFVIQFFDY

SEQ ID NO: 1754 - DNA, 328 bp, Artificial Sequence
  Description of Artificial Sequence: Synthetic polynucleotide
cagtctgtgctgactcagcctgcctccgtgtctgggtctcctggacagtcgatcaccatcccctgcactggaaccggcagtgaccttggtggttttaactatgtctcctggtaccaacaacacccaggcaaagcccccaaattgattatttacgaggtctttaatcggccctcaggggtctctaatcgctactctggctccaagtctggcaacacggcctccctgaccctctctgggctccaggctgaggacgaggctgactattactgcagctcatatacaaccacctctgcgatattcggcggagggaccaagctgaccgtcctag

SEQ ID NO: 1755 - protein, 109 aa, Artificial Sequence
  Description of Artificial Sequence: Synthetic polypeptide
QSVLTQPASVSGSPGQSITIPCTGTGSDLGGFNYVSWYQQHPGKAPKLIIYEVFNRPSGVSNRYSGSKSGNTASLTLSGLQAEDEADYYCSSYTTTSAIFGGGTKLTVL

SEQ ID NO: 1756 - protein, 9 aa, Artificial Sequence
  Description of Artificial Sequence: Synthetic peptide
SSYTTTSAI

SEQ ID NO: 1757 - DNA, 384 bp, Artificial Sequence
  Description of Artificial Sequence: Synthetic polynucleotide
gaagtgcagctggtgcagtccggagcagaggtgaaaaagcccggggagtctctgaggatctcctgtaagggttctggatacagctttaccaactactggatcagctgggtgcgccagatgcccgggaaaggcctggagtggatggggaggattgatcccagtgactcttatataaactacagcccgtccttccaaggccacgtcaccatctcagctgacaggtccaccagcactgcctacctgcagtggagcagcctgaaggcctcggacaccgccatgtattactgtgcgcgacatggttcttatagcagtcgctggttacacgcttcggcctactacggtgtggacgtctggggcctagggaccacggtcaccgtctcctca

SEQ ID NO: 1758 - protein, 128 aa, Artificial Sequence
  Description of Artificial Sequence: Synthetic polypeptide
EVQLVQSGAEVKKPGESLRISCKGSGYSFTNYWISWVRQMPGKGLEWMGRIDPSDSYINYSPSFQGHVTISADRSTSTAYLQWSSLKASDTAMYYCARHGSYSSRWLHASAYYGVDVWGLGTTVTVSS

SEQ ID NO: 1759 - protein, 21 aa, Artificial Sequence
  Description of Artificial Sequence: Synthetic peptide
ARHGSYSSRWLHASAYYGVDV

SEQ ID NO: 1760 - DNA, 331 bp, Artificial Sequence
  Description of Artificial Sequence: Synthetic polynucleotide
cagtctgccctgactcagcctgcctccgtgtctgggtctcctggacagtcgatcaccatctcctgcactggaaccagcagtgacgttggtggttttaactatgtctcctggtaccaacaacaccccggcaaagcccccaaagtcataatttatgaggtcagtaatcggccctcaggggtttctaatcgcttctctggctcgaagtctggcaacacggcctccctgaccatctctgggctccaggctgaggacgaggctgattattactgcaactcatatagaagcagtgccacttgggtgttcggcggagggaccaaggtgaccgtcctag

SEQ ID NO: 1761 - protein, 110 aa, Artificial Sequence
  Description of Artificial Sequence: Synthetic polypeptide
QSALTQPASVSGSPGQSITISCTGTSSDVGGFNYVSWYQQHPGKAPKVIIYEVSNRPSGVSNRFSGSKSGNTASLTISGLQAEDEADYYCNSYRSSATWVFGGGTKVTVL

SEQ ID NO: 1762 - protein, 10 aa, Artificial Sequence
  Description of Artificial Sequence: Synthetic peptide
NSYRSSATWV

SEQ ID NO: 1763 - DNA, 370 bp, Artificial Sequence
  Description of Artificial Sequence: Synthetic polynucleotide
caggtgcagctggtgcagtctggggctgaggtgaagaagcctggggcctcagtgaaggtctcctgcaaggcttctggatacaccttcaccggctactatatgcactgggtgcgacaggcccctggacaagggcttgagtggatgggatggatcaaccctaacagtggtgacacaaactatgcacagaagtttcagggccgggtcaccatgaccagggacacgtccatcagcacagcctacatggaactgagcaggctgagatctgacgacacggccgtgtattactgtgcgagagattacaatttttggagtggtgtcaactactactttgactactggggccagggaaccctggtcaccgtctcctcag

SEQ ID NO: 1764 - protein, 123 aa, Artificial Sequence
  Description of Artificial Sequence: Synthetic polypeptide
QVQLVQSGAEVKKPGASVKVSCKASGYTFTGYYMHWVRQAPGQGLEWMGWINPNSGDTNYAQKFQGRVTMTRDTSISTAYMELSRLRSDDTAVYYCARDYNFWSGVNYYFDYWGQGTLVTVSS

SEQ ID NO: 1765 - protein, 16 aa, Artificial Sequence
  Description of Artificial Sequence: Synthetic peptide
ARDYNFWSGVNYYFDY

SEQ ID NO: 1766 - DNA, 331 bp, Artificial Sequence
  Description of Artificial Sequence: Synthetic polynucleotide
cagtctgtgctgactcagcctgcctccgtgtctgggtctcctggacagtcgatcaccatctcctgcactggagccagcggtgacgttagtggttataactatgtctcctggtaccaacagcacccaggcaaagcccccaaactcatgatttatgaggtcagtaatcggccctcaggggtttctaatcgcttctctggctccaagtctggcaacacggcctccctgaccatctctgggctccgggctgaggacgaggctgattattactgcagctcatatacaagcagcaccactggactcttcggaactgggaccaaggtcaccgtcctag

SEQ ID NO: 1767 - protein, 110 aa, Artificial Sequence
  Description of Artificial Sequence: Synthetic polypeptide
QSVLTQPASVSGSPGQSITISCTGASGDVSGYNYVSWYQQHPGKAPKLMIYEVSNRPSGVSNRFSGSKSGNTASLTISGLRAEDEADYYCSSYTSSTTGLFGTGTKVTVL

SEQ ID NO: 1768 - protein, 10 aa, Artificial Sequence
  Description of Artificial Sequence: Synthetic peptide
SSYTSSTTGL

SEQ ID NO: 1769 - DNA, 399 bp, Artificial Sequence
  Description of Artificial Sequence: Synthetic polynucleotide
caggtgcagctggtggagtctgggggaggcgtggtccagcctgggaggtccctgggactctcctgtgcagcctccggattcaccttcagtaacagggcgctgcactgggtccgccaggccccaggcaaggggctggagtgggttggtgttatatcatacgaaggaagcaatacaaactacgcagactccgtaaagggccgattcaccatctccagagacaatcccaagagcacgttgtatctgcaaatgaacagcctgagagtggaggacacggctgtctatttctgcgcgagagattccgaaaactcctatgacagtcgtggttattattccggacctcccttcctaacctacggaatggacgtctggggccaggggaccacggtcatcgtgtcctca

SEQ ID NO: 1770 - protein, 133 aa, Artificial Sequence
  Description of Artificial Sequence: Synthetic polypeptide
QVQLVESGGGVVQPGRSLGLSCAASGFTFSNRALHWVRQAPGKGLEWVGVISYEGSNTNYADSVKGRFTISRDNPKSTLYLQMNSLRVEDTAVYFCARDSENSYDSRGYYSGPPFLTYGMDVWGQGTTVIVSS

SEQ ID NO: 1771 - protein, 26 aa, Artificial Sequence
  Description of Artificial Sequence: Synthetic peptide
ARDSENSYDSRGYYSGPPFLTYGMDV

SEQ ID NO: 1772 - DNA, 331 bp, Artificial Sequence
  Description of Artificial Sequence: Synthetic polynucleotide
cagtctgtgctgactcagcctgcctccgtgtctgggtctcctggacaggcgatcaccatctcctgcacaggaaccaacagtgacgttggtggttacaattatgtctcctggtaccaacaacacccaggcaaagcccccaaactcatcgtttttgaggtcagtaatcggccctcaggggtttctaatcgcttctctggctccaagtctggcaacacggcctccctgaccatctctgggctccaggctgaggacgaggctacttattactgcagctcgcatacaaccagcatcactctggtgttcggcggcgggaccagactgaccgtcctag

SEQ ID NO: 1773 - protein, 110 aa, Artificial Sequence
  Description of Artificial Sequence: Synthetic polypeptide
QSVLTQPASVSGSPGQAITISCTGTNSDVGGYNYVSWYQQHPGKAPKLIVFEVSNRPSGVSNRFSGSKSGNTASLTISGLQAEDEATYYCSSHTTSITLVFGGGTRLTVL

SEQ ID NO: 1774 - protein, 10 aa, Artificial Sequence
  Description of Artificial Sequence: Synthetic peptide
SSHTTSITLV

SEQ ID NO: 1775 - DNA, 359 bp, Artificial Sequence
  Description of Artificial Sequence: Synthetic polynucleotide
caggtgcagctggtgcagtctggggctgaggtgaagaagcctggggcctcagtgaaggtctcctgcaaggcttctggatacaccttcaccggccactatatgaactgggtgcgacaggcccctggacaagggcttgagtggatgggatgggtcaaccctactagtggtgacgcaaattacgcacagcggtttcacggcagggtcaccatgagcagggacacgtccatcagcacagcctacatggagttgaacagacttacgtctgacgacacggccgtgtattactgtgcgacctatagcagaagttggatgtcgtactttgactgctggggccagggaaccccggtcaccgtctcctc

SEQ ID NO: 1776 - protein, 119 aa, Artificial Sequence
  Description of Artificial Sequence: Synthetic polypeptide
QVQLVQSGAEVKKPGASVKVSCKASGYTFTGHYMNWVRQAPGQGLEWMGWVNPTSGDANYAQRFHGRVTMSRDTSISTAYMELNRLTSDDTAVYYCATYSRSWMSYFDCWGQGTPVTVS

SEQ ID NO: 1777 - protein, 13 aa, Artificial Sequence
  Description of Artificial Sequence: Synthetic peptide
ATYSRSWMSYFDC

SEQ ID NO: 1778 - DNA, 331 bp, Artificial Sequence
  Description of Artificial Sequence: Synthetic polynucleotide
cagtctgccctgactcagcctgcctccgtgtctgggtctcctggacagtcgatcaccatctcctgcactggaaccagcagtgatgttgggaattataaccttgtctcctggtaccaacaacacccaggcaaagcccccaaactcatgattcatgaggacaataagcggccctcaggggtttctaatcgcttctctggctccaagtctggcaacacggcctccctgacaatctctggcctccagggtgaggacgaggctgactattattgcagctcatatgcaggtagaaacactttgttattcggcggagggaccacgctgaccgtcctag

SEQ ID NO: 1779 - protein, 110 aa, Artificial Sequence
  Description of Artificial Sequence: Synthetic polypeptide
QSALTQPASVSGSPGQSITISCTGTSSDVGNYNLVSWYQQHPGKAPKLMIHEDNKRPSGVSNRFSGSKSGNTASLTISGLQGEDEADYYCSSYAGRNTLLFGGGTTLTVL

SEQ ID NO: 1780 - protein, 10 aa, Artificial Sequence
  Description of Artificial Sequence: Synthetic peptide
SSYAGRNTLL

SEQ ID NO: 1781 - DNA, 361 bp, Artificial Sequence
  Description of Artificial Sequence: Synthetic polynucleotide
caggtgcagctggtgcagtctggggctgagatgaagaagcctggggcctcaatgaaggtctcctgcaaggcctctggatacaccttcaccggccactatatacactgggtacgacaggccccaggacaagggcttgagtggatgggttgggtcaaccctaacagtggtgacacaaactatgcacagaagtttcagggtagggtcaccatgaccagggacacgtccatcagcacagcctacttggaactgagcagactgaaatctgaggacacggccgtgtatttttgtgccacatataagagtaactggctatcctattttgactactggggccagggaaccctggtcaccgtctcctcag

SEQ ID NO: 1782 - protein, 120 aa, Artificial Sequence
  Description of Artificial Sequence: Synthetic polypeptide
QVQLVQSGAEMKKPGASMKVSCKASGYTFTGHYIHWVRQAPGQGLEWMGWVNPNSGDTNYAQKFQGRVTMTRDTSISTAYLELSRLKSEDTAVYFCATYKSNWLSYFDYWGQGTLVTVSS

SEQ ID NO: 1783 - protein, 13 aa, Artificial Sequence
  Description of Artificial Sequence: Synthetic peptide
ATYKSNWLSYFDY

SEQ ID NO: 1784 - DNA, 329 bp, Artificial Sequence
  Description of Artificial Sequence: Synthetic polynucleotide
cagtctgccctgactcagcctgcctccgtgtctgggtctcctggacagtcgatcaccatctcctgcactgggaccagaagtgatgttgggaaatataactttgtctcctggtaccaacatcacccaggcaaagcccccaaactcattattcatgaggacaataagcggccctcaggggtttctaatcgcttctctggctccaagtctggcaacacggcctccctgacaatctctgggctccaggctgaggacgaggctgattaccactgttgctcatatgcaggttatagtaatttggtattcggcggagggaccaagctgaccgtcct

SEQ ID NO: 1785 - protein, 109 aa, Artificial Sequence
  Description of Artificial Sequence: Synthetic polypeptide
QSALTQPASVSGSPGQSITISCTGTRSDVGKYNFVSWYQHHPGKAPKLIIHEDNKRPSGVSNRFSGSKSGNTASLTISGLQAEDEADYHCCSYAGYSNLVFGGGTKLTV

SEQ ID NO: 1786 - protein, 10 aa, Artificial Sequence
  Description of Artificial Sequence: Synthetic peptide
CSYAGYSNLV

SEQ ID NO: 1787 - DNA, 375 bp, Artificial Sequence
  Description of Artificial Sequence: Synthetic polynucleotide
gaagtgcagctggtgcagtccggagcagaggtgaaaaagcccggggagtctctgaggatctcctgtcagggttctggagacagctttaccacctactggatcagttgggtgcgccagatgcccgggaaaggcctggagtggatggggcggattgatccaagtgactcttacattaattacagcccgtccttccaaggccacgtcgccttctcagttgacaaggccgtcaacactgcctacctgcagtggagcaccctgaaggcctcggacaccgccatatattactgtgcgagacatagtttgagtatggcaggccatgtctcctactactatatggacgtctggggcaaagggactacggtcaccgtctcctca

SEQ ID NO: 1788 - protein, 125 aa, Artificial Sequence
  Description of Artificial Sequence: Synthetic polypeptide
EVQLVQSGAEVKKPGESLRISCQGSGDSFTTYWISWVRQMPGKGLEWMGRIDPSDSYINYSPSFQGHVAFSVDKAVNTAYLQWSTLKASDTAIYYCARHSLSMAGHVSYYYMDVWGKGTTVTVSS

SEQ ID NO: 1789 - protein, 18 aa, Artificial Sequence
  Description of Artificial Sequence: Synthetic peptide
ARHSLSMAGHVSYYYMDV

SEQ ID NO: 1790 - DNA, 328 bp, Artificial Sequence
  Description of Artificial Sequence: Synthetic polynucleotide
cagtgtgtgctgactcagcctgccgccgtgtctgggtctcctggacagtcgatcaccatctcctgcactggaaccagcagtgatgttgggagttataaccttgtctcctggttccaacagtacccaggcaaagcccccaaactcatcatttatgagggcagtaagcggccctcaggggtttctaatcgcttctctggctccaagtctggcaacacggcctccctgacagtctctgggctccaggctgaggacgagtctgagtattactgttgctcatatgcaggtagtaagtgggtattcggtggagggaccaagatgaccgtcctag

SEQ ID NO: 1791 - protein, 109 aa, Artificial Sequence
  Description of Artificial Sequence: Synthetic polypeptide
QCVLTQPAAVSGSPGQSITISCTGTSSDVGSYNLVSWFQQYPGKAPKLIIYEGSKRPSGVSNRFSGSKSGNTASLTVSGLQAEDESEYYCCSYAGSKWVFGGGTKMTVL

SEQ ID NO: 1792 - protein, 9 aa, Artificial Sequence
  Description of Artificial Sequence: Synthetic peptide
CSYAGSKWV

SEQ ID NO: 1793 - DNA, 360 bp, Artificial Sequence
  Description of Artificial Sequence: Synthetic polynucleotide
caggtgcagctggtgcagtctgggcctgaggtgaagaagcctggggcctcagtgaagatttcctgcaaggcatctggatacaccttcaccaggtactggcttcactgggtgcgacaggcccctggacaagggcttgagtggatgggaataatcgaccctagtggtggcagcacaagctactcacagaaggtccagggcagagtcaccttgaccagggacacgtccacgagcagtgtttacatggaattgagcagcctgagaagtgaagacacggccgtgtatttttgtgcgcgagaaatgcaagacttctacaattacttggacgtctggggcaaagggacctcagtcaccgtcttctca

SEQ ID NO: 1794 - protein, 120 aa, Artificial Sequence
  Description of Artificial Sequence: Synthetic polypeptide
QVQLVQSGPEVKKPGASVKISCKASGYTFTRYWLHWVRQAPGQGLEWMGIIDPSGGSTSYSQKVQGRVTLTRDTSTSSVYMELSSLRSEDTAVYFCAREMQDFYNYLDVWGKGTSVTVFS

SEQ ID NO: 1795 - protein, 13 aa, Artificial Sequence
  Description of Artificial Sequence: Synthetic peptide
AREMQDFYNYLDV

SEQ ID NO: 1796 - DNA, 333 bp, Artificial Sequence
  Description of Artificial Sequence: Synthetic polynucleotide
aattttatgctgactcagccgcactctgtgtcggagtctccggggaagacggtgaccatctcctgcacccgcagcagtggcaacatagccgacttctatgtacagtggtaccgccagcgcccgggcagtgcccccgcccctgtgatctatgagaataaccaaagatactctggggtccctgatcgtttctctggctccatcgacagctcctccaactctgcctccctcaccatctctggactgaagactgaggacgaggctgactactactgtcagtcttctgataccactaccccttgggtgttcggcggagggaccaggctgaccgtccta

SEQ ID NO: 1797 - protein, 111 aa, Artificial Sequence
  Description of Artificial Sequence: Synthetic polypeptide
NFMLTQPHSVSESPGKTVTISCTRSSGNIADFYVQWYRQRPGSAPAPVIYENNQRYSGVPDRFSGSIDSSSNSASLTISGLKTEDEADYYCQSSDTTTPWVFGGGTRLTVL

SEQ ID NO: 1798 - protein, 10 aa, Artificial Sequence
  Description of Artificial Sequence: Synthetic peptide
QSSDTTTPWV

SEQ ID NO: 1799 - DNA, 349 bp, Artificial Sequence
  Description of Artificial Sequence: Synthetic polynucleotide
caggtgcagctggtggagtctgggggaggcgtggtccagcctgggaggtccctgaaactctcctgtgcagcctctggattcaccttcagtcattatggtatacactgggtccgccaggctccaggcaaggggctggagtgggtgacttttatatcatatgatggaagcaataaaaactacgcagactccgtgaagggccgattcaccatctccagagacaattccaagaacatgctgtttctgcaaatgaacagcctgagagctgaggacacggctgtctatttctgtgcgagaggtttgtttgggttcgacccctggggccagggagccctggtcaccgtctcctcag

SEQ ID NO: 1800 - protein, 116 aa, Artificial Sequence
  Description of Artificial Sequence: Synthetic polypeptide
QVQLVESGGGVVQPGRSLKLSCAASGFTFSHYGIHWVRQAPGKGLEWVTFISYDGSNKNYADSVKGRFTISRDNSKNMLFLQMNSLRAEDTAVYFCARGLFGFDPWGQGALVTVSS

SEQ ID NO: 1801 - protein, 9 aa, Artificial Sequence
  Description of Artificial Sequence: Synthetic peptide
ARGLFGFDP

SEQ ID NO: 1802 - DNA, 331 bp, Artificial Sequence
  Description of Artificial Sequence: Synthetic polynucleotide
cagtctgtgctgactcagcctgcctccgtgtctgggtctcctggacagtcgatcaccatctcctgcactggaaccagcagtgacgttggtggttataactatgtctcctggtaccaacaactcccaggcaaagcccccaaagtcatgatttatgaggtcagtaatcggccctcaggtgtttataatcgcttctctggctccaagtatggcaacacggcctccctgaccatctctgggctccaggctgaggacgaggctgattattactgcagctcatatacaggcagcagcacttatgtcttcggaactgggaccaaggtcaccgtcctag

SEQ ID NO: 1803 - protein, 110 aa, Artificial Sequence
  Description of Artificial Sequence: Synthetic polypeptide
QSVLTQPASVSGSPGQSITISCTGTSSDVGGYNYVSWYQQLPGKAPKVMIYEVSNRPSGVYNRFSGSKYGNTASLTISGLQAEDEADYYCSSYTGSSTYVFGTGTKVTVL

SEQ ID NO: 1804 - protein, 10 aa, Artificial Sequence
  Description of Artificial Sequence: Synthetic peptide
SSYTGSSTYV

SEQ ID NO: 1805 - DNA, 364 bp, Artificial Sequence
  Description of Artificial Sequence: Synthetic polynucleotide
gaggtgcagctgttggagtctgggggagacttggtacagcctggggggtcccttagactctcctgtacaacctctggattcacctttagcaattatgccatgacctgggtccgccagtctccagggaagggcctggagtgggtctcaggaatcagtggtcgtggtgatagtacatactacgcagactccgtgaagggccgattcatcatctccagagacaattccaagaacacggtgtatctacaaatgaacagcctgagagccgaggacacggccgtctactactgtgcgaaagacacgggtatcccagcacctttctactttgactactggggccagggaaccctggtcgccgtctcctcag

SEQ ID NO: 1806 - protein, 121 aa, Artificial Sequence
  Description of Artificial Sequence: Synthetic polypeptide
EVQLLESGGDLVQPGGSLRLSCTTSGFTFSNYAMTWVRQSPGKGLEWVSGISGRGDSTYYADSVKGRFIISRDNSKNTVYLQMNSLRAEDTAVYYCAKDTGIPAPFYFDYWGQGTLVAVSS

SEQ ID NO: 1807 - protein, 14 aa, Artificial Sequence
  Description of Artificial Sequence: Synthetic peptide
AKDTGIPAPFYFDY

SEQ ID NO: 1808 - DNA, 340 bp, Artificial Sequence
  Description of Artificial Sequence: Synthetic polynucleotide
cagtctgtgctgactcagtcgccctctgcctctgcctccctgggagcctcggtcaggctcacctgcactctgagcagtgcgtacagcaactacggcatcgcatggcatcagcaacacccagagaagggccctcgatacttaatgaaagttaatagtgatggcagccacactaagggggacgggatccctgatcgcttctcaggctccagttctggggctgagcgctacctcaccatctccagtctccagtctgaggatgaggctgactattactgtcagacgtgggccgctggcatgcttcatgtggtattcggcggagggaccaagctgaccgtcctag

SEQ ID NO: 1809 - protein, 113 aa, Artificial Sequence
  Description of Artificial Sequence: Synthetic polypeptide
QSVLTQSPSASASLGASVRLTCTLSSAYSNYGIAWHQQHPEKGPRYLMKVNSDGSHTKGDGIPDRFSGSSSGAERYLTISSLQSEDEADYYCQTWAAGMLHVVFGGGTKLTVL

SEQ ID NO: 1810 - protein, 11 aa, Artificial Sequence
  Description of Artificial Sequence: Synthetic peptide
QTWAAGMLHVV

SEQ ID NO: 1811 - DNA, 361 bp, Artificial Sequence
  Description of Artificial Sequence: Synthetic polynucleotide
caggtgcagctggtggagtctgggggaggcggggtccagcctgggaggtccctgagactctcctgtgcagcctctggattcgccttcagtagctatggcatgcactgggtccgccaggctccaggcaaggggctggagtgggtggccactatctcatatgatgcaagtgataaatggtatgttgactccgtggagggccgattcaccatctccagagacaattcgaagaacacactgtatctgcagatgagcagcctgagagctgaggacacggctgtgtacttctgtgcgcagagccgaggcaactcttttggagtggtgtcttcctggggccagggaacgctggtcatcgtctcctcag

SEQ ID NO: 1812 - protein, 120 aa, Artificial Sequence
  Description of Artificial Sequence: Synthetic polypeptide
QVQLVESGGGGVQPGRSLRLSCAASGFAFSSYGMHWVRQAPGKGLEWVATISYDASDKWYVDSVEGRFTISRDNSKNTLYLQMSSLRAEDTAVYFCAQSRGNSFGVVSSWGQGTLVIVSS

SEQ ID NO: 1813 - protein, 13 aa, Artificial Sequence
  Description of Artificial Sequence: Synthetic peptide
AQSRGNSFGVVSS

SEQ ID NO: 1814 - DNA, 337 bp, Artificial Sequence
  Description of Artificial Sequence: Synthetic polynucleotide
cagtctgtgctgactcagtcgccctctgcctctgcctccctgggagcctcggtcaaactcacctgcactctgagcagtgggcacactaagtacgtcatcgcttggcatcagcagcagccagagaagggccctcggtacttgatgacccttaatagtgatggcagccacactaagggggacggtatccctgatcgcttctcaggctcagtctccaactctggggctgagcgctacctcaccatctccagcctccagtctgatgatgagggtgactattactgtcagacttggggcaccggcattgtggcgttcggcggagggaccaagctgaccgtcc

SEQ ID NO: 1815 - protein, 112 aa, Artificial Sequence
  Description of Artificial Sequence: Synthetic polypeptide
QSVLTQSPSASASLGASVKLTCTLSSGHTKYVIAWHQQQPEKGPRYLMTLNSDGSHTKGDGIPDRFSGSVSNSGAERYLTISSLQSDDEGDYYCQTWGTGIVAFGGGTKLTV

SEQ ID NO: 1816 - protein, 9 aa, Artificial Sequence
  Description of Artificial Sequence: Synthetic peptide
QTWGTGIVA

SEQ ID NO: 1817 - DNA, 354 bp, Artificial Sequence
  Description of Artificial Sequence: Synthetic polynucleotide
gaggtgcagctggtggagtctgggggaggcctggtcaagcctggggggtccctgagactctcctgtgcaacttctggattcagcttcagtacccacagcatgaactgggtccgccaggccccagggaaggggctggagtgggtcgcatccatcactagtgggaatactcacctatactacgcagactcagtgaagggccgattcaccatcgacaacgccaagaattcactgtttctggaaatgaacagcctgagagccgaggacacggctgtgtattactgtgcgagaataaagcgattttccccgtggggtatggacgtctggggccaagggaccaccgtcatcgtctcctca

SEQ ID NO: 1818 - protein, 118 aa, Artificial Sequence
  Description of Artificial Sequence: Synthetic polypeptide
EVQLVESGGGLVKPGGSLRLSCATSGFSFSTHSMNWVRQAPGKGLEWVASITSGNTHLYYADSVKGRFTIDNAKNSLFLEMNSLRAEDTAVYYCARIKRFSPWGMDVWGQGTTVIVSS

SEQ ID NO: 1819 - protein, 13 aa, Artificial Sequence
  Description of Artificial Sequence: Synthetic peptide
ARIKRFSPWGMDV

SEQ ID NO: 1820 - DNA, 331 bp, Artificial Sequence
  Description of Artificial Sequence: Synthetic polynucleotide
cagtctgtgctgactcagccgccctcagtgtctggggccccaggacagagggtcaccatctcctgcactgggagcagctccaacatcggggcaggttatgaagtacactggtaccagcaacttccaggaacagcccccaaactcctcatctatggtaacatcaatcggccctcaggggtccctgaccgattctctgcctccaagtctggcacctcagcctccctggccatcactgggctccaggctgaggatgaggctgattattactgccagtcctatgacaacaggctgagtgtcgtattcggcggagggaccaagctgaccgtcgtag

SEQ ID NO: 1821 - protein, 110 aa, Artificial Sequence
  Description of Artificial Sequence: Synthetic polypeptide
QSVLTQPPSVSGAPGQRVTISCTGSSSNIGAGYEVHWYQQLPGTAPKLLIYGNINRPSGVPDRFSASKSGTSASLAITGLQAEDEADYYCQSYDNRLSVVFGGGTKLTVV

SEQ ID NO: 1822 - protein, 10 aa, Artificial Sequence
  Description of Artificial Sequence: Synthetic peptide
QSYDNRLSVV

SEQ ID NO: 1823 - DNA, 363 bp, Artificial Sequence
  Description of Artificial Sequence: Synthetic polynucleotide
caggtgcagctggtggagtctgggggaggcgtggtccagcctgggaggtccctgagactctcctgtgcagcctctggattcaccttcagtgactatggcatgcactgggtccgccaggctccaggcaaggggctggagtgggtggcacatatattatatgatggaagtaaacaaaagtatgcagactccgtgaagggccgattcaccatctccagagacaattcccagaacacgctgtatctgcaaatgaacagtctgagagctgaggacacggctgtctattcctgtgcaaaagggatactacccaattactactacgctatggacgtctggggccaagggaccacggtcaccgtctcctca

SEQ ID NO: 1824 - protein, 121 aa, Artificial Sequence
  Description of Artificial Sequence: Synthetic polypeptide
QVQLVESGGGVVQPGRSLRLSCAASGFTFSDYGMHWVRQAPGKGLEWVAHILYDGSKQKYADSVKGRFTISRDNSQNTLYLQMNSLRAEDTAVYSCAKGILPNYYYAMDVWGQGTTVTVSS

SEQ ID NO: 1825 - protein, 14 aa, Artificial Sequence
  Description of Artificial Sequence: Synthetic peptide
AKGILPNYYYAMDV

SEQ ID NO: 1826 - DNA, 331 bp, Artificial Sequence
  Description of Artificial Sequence: Synthetic polynucleotide
cagtctgtgctgactcagccgccctcagtgtctggggccccagggcagagggtcgccatctcctgcattgggagcagctccaacatcggggcaggttctgatgtacagtggtaccagcagcttccaggaaacgcccccaaactcctcatctatgctaacaccattcggccctcaggggtccctgaccgattctctggctccaagtctggcacctcagcctccctggccatcactgggctccaggctgaggatgaggctgattattactgccagtcctatgacagcagcctgagtggggtcttcggaactgggaccaaggtcaccgtcctag

SEQ ID NO: 1827 - protein, 110 aa, Artificial Sequence
  Description of Artificial Sequence: Synthetic polypeptide
QSVLTQPPSVSGAPGQRVAISCIGSSSNIGAGSDVQWYQQLPGNAPKLLIYANTIRPSGVPDRFSGSKSGTSASLAITGLQAEDEADYYCQSYDSSLSGVFGTGTKVTVL

SEQ ID NO: 1828 - protein, 10 aa, Artificial Sequence
  Description of Artificial Sequence: Synthetic peptide
QSYDSSLSGV

SEQ ID NO: 1829 - DNA, 355 bp, Artificial Sequence
  Description of Artificial Sequence: Synthetic polynucleotide
caggtgcagctggtgcagtctggggctgaggtgaagaagcctggggcctcagtgaaggtctcctgcaaggcttctggatactttttcaccggccactatttgcactgggtgcgacaggcccctggacaagggcttgagtggatgggatggatcaaccctaacagtggtgacacacactatgcacagaggtttcaggggagggtcaccatgaccagggacacgtccatcagcacagcctacatggaggtgagcaggctgagatctgacgacacggccgtttattactgtgcgagatttcgagggatgtcggactttgacttctggggccagggaaccctggtcaccgtctcctcag

SEQ ID NO: 1830 - protein, 118 aa, Artificial Sequence
  Description of Artificial Sequence: Synthetic polypeptide
QVQLVQSGAEVKKPGASVKVSCKASGYFFTGHYLHWVRQAPGQGLEWMGWINPNSGDTHYAQRFQGRVTMTRDTSISTAYMEVSRLRSDDTAVYYCARFRGMSDFDFWGQGTLVTVSS

SEQ ID NO: 1831 - protein, 11 aa, Artificial Sequence
  Description of Artificial Sequence: Synthetic peptide
ARFRGMSDFDF

SEQ ID NO: 1832 - DNA, 331 bp, Artificial Sequence
  Description of Artificial Sequence: Synthetic polynucleotide
cagtctgccctgactcagcctccctccgcgtccgggtctcctggacagtcagtcaccatctcctgcactggaaccagcagtgacgttggtggttttaactttgtctcctggtaccaacagcacccaggcaaagcccccaaactcatgatttatgaggtcactaagcggccctcaggggtccctgatcgcttctcgggctccaagtctggcaacacggcctccctgaccgtctctgggctccagtctgaggatgaggctgattattactgcagctcatatgcaggcagaaataatttggtattcggcggagggaccaagctgaccgtcctag

SEQ ID NO: 1833 - protein, 110 aa, Artificial Sequence
  Description of Artificial Sequence: Synthetic polypeptide
QSALTQPPSASGSPGQSVTISCTGTSSDVGGFNFVSWYQQHPGKAPKLMIYEVTKRPSGVPDRFSGSKSGNTASLTVSGLQSEDEADYYCSSYAGRNNLVFGGGTKLTVL

SEQ ID NO: 1834 - protein, 10 aa, Artificial Sequence
  Description of Artificial Sequence: Synthetic peptide
SSYAGRNNLV

SEQ ID NO: 1835 - DNA, 370 bp, Artificial Sequence
  Description of Artificial Sequence: Synthetic polynucleotide
gaggtgcagctggtggagtctgggggaggcttggtacagcctggagggtccctgagactctcctgtacagcctctggattcagcttcaggagttatgaaatgaactgggtccgccaggctccagggaaggggctggagtgggtttcatacattagtagtactgctggtgccttatactacgcagactctgtgaagggccgattcaccatctccagagacaacgccaggaattcagtgtctctgcaaatgaacagcctgagagccgaggacacggctgtttattactgtgcgagaggaggtctcgggtatagtgagagttcaaactggttcgacccctggggccagggaaccctggtcaccgtctcctcag

SEQ ID NO: 1836 - protein, 123 aa, Artificial Sequence
  Description of Artificial Sequence: Synthetic polypeptide
EVQLVESGGGLVQPGGSLRLSCTASGFSFRSYEMNWVRQAPGKGLEWVSYISSTAGALYYADSVKGRFTISRDNARNSVSLQMNSLRAEDTAVYYCARGGLGYSESSNWFDPWGQGTLVTVSS

SEQ ID NO: 1837 - protein, 16 aa, Artificial Sequence
  Description of Artificial Sequence: Synthetic peptide
ARGGLGYSESSNWFDP

SEQ ID NO: 1838 - DNA, 322 bp, Artificial Sequence
  Description of Artificial Sequence: Synthetic polynucleotide
gacatccagatgacccagtctccttccaccctgtctgcatctgtaggagacagagtcaccatcacttgccgggccagtcagagtattagtagttcgttggcctggtatcagcagaaaccagggaaagcccctaagctcctgatctataaggcgtctagtttagaaagtggggtcccatcaaggttcagcggcagtggatctgggacagaattcagtctcaccatcagcagcctgcagcctgatgactttgcaagttattactgccaacactataacagttatccgtggacgttcggccaagggaccaaggtggaaatcaaac

SEQ ID NO: 1839 - protein, 107 aa, Artificial Sequence
  Description of Artificial Sequence: Synthetic polypeptide
DIQMTQSPSTLSASVGDRVTITCRASQSISSSLAWYQQKPGKAPKLLIYKASSLESGVPSRFSGSGSGTEFSLTISSLQPDDFASYYCQHYNSYPWTFGQGTKVEIK

SEQ ID NO: 1840 - protein, 9 aa, Artificial Sequence
  Description of Artificial Sequence: Synthetic peptide
QHYNSYPWT

SEQ ID NO: 1841 - DNA, 358 bp, Artificial Sequence
  Description of Artificial Sequence: Synthetic polynucleotide
gaggtgcagctggtggagtctgggggaggcttggtacaacctggagggtccctgagactctcgtgtgcagcctctggattcaccttcagtagtcatgaaatgaattgggtccgccaggctccagggaaggggctggagtggctttcatacattagtgatagtggtagtgacatatactacgcagactctgtgaagggccgattcaccatctccagagacaacgtcaagaattcactgtatctgcaaatgaacagcctgagagtggaggacatggctatttattactgtgtgagagcgccgggtggctacaattatcttgactactggggccagggaaccctggtcaccgtctcctcag

SEQ ID NO: 1842 - protein, 119 aa, Artificial Sequence
  Description of Artificial Sequence: Synthetic polypeptide
EVQLVESGGGLVQPGGSLRLSCAASGFTFSSHEMNWVRQAPGKGLEWLSYISDSGSDIYYADSVKGRFTISRDNVKNSLYLQMNSLRVEDMAIYYCVRAPGGYNYLDYWGQGTLVTVSS

SEQ ID NO: 1843 - protein, 12 aa, Artificial Sequence
  Description of Artificial Sequence: Synthetic peptide
VRAPGGYNYLDY

SEQ ID NO: 1844 - DNA, 325 bp, Artificial Sequence
  Description of Artificial Sequence: Synthetic polynucleotide
gacatccagatgacccagtctccttccaccctgtctgcatctgtaggagacagagtcaccatcacttgccgggccagtcagagtattagtaggtgggtggcctggtatcagcagaaaccagggaaagcccctaaactcctgatctttaaggcgtccagtttacaaggtggggtcccatcaaggttcagcggcagtggatctgggacagaattcactctcaccatcagcagcctgcagcctgatgattttgcaacttattactgccaacagtataatactttttctcgggtcaccttcggccaagggacacgactggagattaaac

SEQ ID NO: 1845 - protein, 108 aa, Artificial Sequence
  Description of Artificial Sequence: Synthetic polypeptide
DIQMTQSPSTLSASVGDRVTITCRASQSISRWVAWYQQKPGKAPKLLIFKASSLQGGVPSRFSGSGSGTEFTLTISSLQPDDFATYYCQQYNTFSRVTFGQGTRLEIK

SEQ ID NO: 1846 - protein, 10 aa, Artificial Sequence
  Description of Artificial Sequence: Synthetic peptide
QQYNTFSRVT

SEQ ID NO: 1847 - DNA, 361 bp, Artificial Sequence
  Description of Artificial Sequence: Synthetic polynucleotide
caggtgcagctggtggagtctgggggaggcgtggtccagcctgggaggtccctaagactctcctgtgcagcctctggattcaccttcagtgactatggcatgcactgggtccgccaggctccaggcaaggggctggagtggctggcagttatatcatatgatggaagcagtaagaactttgcagactccgtgaagggccgattcaccatctccagagacaactccaagaacacgctgtatctgcaaatgaacagcctgagagctgaggacacggctgtgtattactgtgcgaaatctccgacggcgatagatcccccctttgactactggggccagggaaccctggtcaccgtctcctcag

SEQ ID NO: 1848 - protein, 120 aa, Artificial Sequence
  Description of Artificial Sequence: Synthetic polypeptide
QVQLVESGGGVVQPGRSLRLSCAASGFTFSDYGMHWVRQAPGKGLEWLAVISYDGSSKNFADSVKGRFTISRDNSKNTLYLQMNSLRAEDTAVYYCAKSPTAIDPPFDYWGQGTLVTVSS

SEQ ID NO: 1849 - protein, 13 aa, Artificial Sequence
  Description of Artificial Sequence: Synthetic peptide
AKSPTAIDPPFDY

SEQ ID NO: 1850 - DNA, 322 bp, Artificial Sequence
  Description of Artificial Sequence: Synthetic polynucleotide
gaaatagtgatgacgcagtctccagccaccctgtctgtgtctccaggggaaagagccaccctctcctgcagggccagtcagagtgttaccaccaacttggcctggtaccagcagaaacctggccaggctcccaggctcctcatctatggtgcatccaccagggccactggtatcccagccaggttcagtggcagtgggtctgggacagagttcactctcaccatcaccagcctgcagtctgaagattttgcagtttattactgtcagcagtataataactggcctccgaggttcggccaagggaccaaggtggaaatcaaac

SEQ ID NO: 1851 - protein, 107 aa, Artificial Sequence
  Description of Artificial Sequence: Synthetic polypeptide
EIVMTQSPATLSVSPGERATLSCRASQSVTTNLAWYQQKPGQAPRLLIYGASTRATGIPARFSGSGSGTEFTLTITSLQSEDFAVYYCQQYNNWPPRFGQGTKVEIK

SEQ ID NO: 1852 - protein, 9 aa, Artificial Sequence
  Description of Artificial Sequence: Synthetic peptide
QQYNNWPPR

SEQ ID NO: 1853 - DNA, 355 bp, Artificial Sequence
  Description of Artificial Sequence: Synthetic polynucleotide
caggtgcagctggtgcagtctgggactgaggtgaagaagcctgggtcgtcggtgaggatctcctgcaaggcttctggaggcaccttcagcaattttgctatcaactgggtgcgacaggcccccggacaagggcttgagtggatgggagggatcatccctatctttggttcagcaaactacgcacagaagttccagggcagagtcacgattagcgcggacgactccacgactacagtctacatggagcagagtagcctgagatctgaggacacggccctatattactgtgcgaggacggggggctacggatcgattgacgactggggccagggaaccctggtcatcgtctcctcag

SEQ ID NO: 1854 - protein, 118 aa, Artificial Sequence
  Description of Artificial Sequence: Synthetic polypeptide
QVQLVQSGTEVKKPGSSVRISCKASGGTFSNFAINWVRQAPGQGLEWMGGIIPIFGSANYAQKFQGRVTISADDSTTTVYMEQSSLRSEDTALYYCARTGGYGSIDDWGQGTLVIVSS

SEQ ID NO: 1855 - protein, 11 aa, Artificial Sequence
  Description of Artificial Sequence: Synthetic peptide
ARTGGYGSIDD

SEQ ID NO: 1856 - DNA, 337 bp, Artificial Sequence
  Description of Artificial Sequence: Synthetic polynucleotide
gatattgtgatgactcagtctccactctccctgcccgtcacccctggagagccggcctccatctcctgcaggtctagtcagagcctcctgcatagtaatggattcaactatttggattggtacctgcagaagccagggcagtctccacagctcctgatctatttgggttctaatcgggcctccggggtccctgacaggttcagtggcagtggatcaggcacagattttacactgaaaatcagcagagtggaggctgaggatgttggggtttattactgcatgcaagctctacaaactcctctcagttttggccaggggaccaagctggagatcaaac

SEQ ID NO: 1857 - protein, 112 aa, Artificial Sequence
  Description of Artificial Sequence: Synthetic polypeptide
DIVMTQSPLSLPVTPGEPASISCRSSQSLLHSNGFNYLDWYLQKPGQSPQLLIYLGSNRASGVPDRFSGSGSGTDFTLKISRVEAEDVGVYYCMQALQTPLSFGQGTKLEIK

SEQ ID NO: 1858 - protein, 9 aa, Artificial Sequence
  Description of Artificial Sequence: Synthetic peptide
MQALQTPLS

SEQ ID NO: 1859 - DNA, 355 bp, Artificial Sequence
  Description of Artificial Sequence: Synthetic polynucleotide
caggtgcagctggtgcagtctggggctgaggtgaagaagcctgggtcctcggtgaaggtctcctgtaaggcttctggaggcaccttcagcaactatgccatcaattggatccgtcaggcccctggacaagggcttgagtggatgggagggatcatccctttctttggtacagcgaactacgcacagaagttccagggcagagtcacaattaccgcggacgagtccacgagcacagcctacatggagctgaccagtctgagatctggggacacggccatgtatttctgtgcgagagatggtggccacgcagactttgactactggggccagggaaccctggtcaccgtctcctcag

SEQ ID NO: 1860 - protein, 118 aa, Artificial Sequence
  Description of Artificial Sequence: Synthetic polypeptide
QVQLVQSGAEVKKPGSSVKVSCKASGGTFSNYAINWIRQAPGQGLEWMGGIIPFFGTANYAQKFQGRVTITADESTSTAYMELTSLRSGDTAMYFCARDGGHADFDYWGQGTLVTVSS

SEQ ID NO: 1861 - protein, 11 aa, Artificial Sequence
  Description of Artificial Sequence: Synthetic peptide
ARDGGHADFDY

SEQ ID NO: 1862 - DNA, 337 bp, Artificial Sequence
  Description of Artificial Sequence: Synthetic polynucleotide
gatattgtgatgactcagtctccactctccctgtccgtcagccctggacagccggcctccatctcctgcaggtctagtcagagcctcctgcatagaagtggctacaactatttggattggtacctgcagaagccagggcagtctccacagctcctaatctatttgggttctactcgggcctccggggtccctgacaggttcagtggcagtggatcaggcacagattttacactgaaaatcagccgagtggaggctgaggatgttggggtttattactgcatgcaagctgtacacactccgatcaccttcggccaagggacacgactggagattaaac

SEQ ID NO: 1863 - protein, 112 aa, Artificial Sequence
  Description of Artificial Sequence: Synthetic polypeptide
DIVMTQSPLSLSVSPGQPASISCRSSQSLLHRSGYNYLDWYLQKPGQSPQLLIYLGSTRASGVPDRFSGSGSGTDFTLKISRVEAEDVGVYYCMQAVHTPITFGQGTRLEIK

SEQ ID NO: 1864 - protein, 9 aa, Artificial Sequence
  Description of Artificial Sequence: Synthetic peptide
MQAVHTPIT

SEQ ID NO: 1865 - DNA, 358 bp, Artificial Sequence
  Description of Artificial Sequence: Synthetic polynucleotide
gaggtgcagctggtggagtctgggggaggcttggtacagcctggagggtccctgagactctcctgtgcagcctctggattcaacttcagaagttatgaaatgaattgggtccgccaggctccagggaaggggctggagtgggttgcatacattaatagtggtggtacttccacgtactctgcagagtctctgaagggccgattcaccatctccagagacgacgtcaagaattcactgtttctgcagatgaccagcctgacagccgaagacacggctgtttattactgtgcgagagccggggatggctacaattactttgacttctggggccagggcaccctggtcaccgtctcctcag

SEQ ID NO: 1866 - protein, 119 aa, Artificial Sequence
  Description of Artificial Sequence: Synthetic polypeptide
EVQLVESGGGLVQPGGSLRLSCAASGFNFRSYEMNWVRQAPGKGLEWVAYINSGGTSTYSAESLKGRFTISRDDVKNSLFLQMTSLTAEDTAVYYCARAGDGYNYFDFWGQGTLVTVSS

SEQ ID NO: 1867 - protein, 12 aa, Artificial Sequence
  Description of Artificial Sequence: Synthetic peptide
ARAGDGYNYFDF

SEQ ID NO: 1868 - DNA, 325 bp, Artificial Sequence
  Description of Artificial Sequence: Synthetic polynucleotide
gacatccagatgacccagtctccttccaccctgtctgcatctgtgggagacagagtcaccatcacttgccgggccagtgagagtattagtagttggttggcctggtatcagcagaaaccagggagagcccctaagctcctaatctataaggcgtctagtttagtaagtggggtcccatcaaggttcagcggcagtggatctgggacaaaattcactctcaccatcagcagcctgcagcctgatgattttgcaacttattactgccaacagtataatacttattctcggctcactttcggcggagggaccaaggtggagatcaaac

SEQ ID NO: 1869 - protein, 108 aa, Artificial Sequence
  Description of Artificial Sequence: Synthetic polypeptide
DIQMTQSPSTLSASVGDRVTITCRASESISSWLAWYQQKPGRAPKLLIYKASSLVSGVPSRFSGSGSGTKFTLTISSLQPDDFATYYCQQYNTYSRLTFGGGTKVEIK

SEQ ID NO: 1870 - protein, 10 aa, Artificial Sequence
  Description of Artificial Sequence: Synthetic peptide
QQYNTYSRLT

SEQ ID NO: 1871 - DNA, 355 bp, Artificial Sequence
  Description of Artificial Sequence: Synthetic polynucleotide
caggtgcagctggtgcagtctggggctgaggtgaagcagcctgggtcctcggtgaaggtctcctgcaaggcctctggaggcacgttcagcacctttgctatcaactggctgcgacaggcccctggacaagggcttgagtggatgggagggatcatccctgtctttggaaaggcaaactacgcacagaagttccagggcagagtcacgattatcgcggacgaatccacgaccacagcctacatggaggtgcgcagcctaagatctgaggacacggccgtgtattactgtgcgagaactgatggctacgggtctcttgacccttggggccagggaaccctggtcaccgtctcctcag

SEQ ID NO: 1872 - protein, 118 aa, Artificial Sequence
  Description of Artificial Sequence: Synthetic polypeptide
QVQLVQSGAEVKQPGSSVKVSCKASGGTFSTFAINWLRQAPGQGLEWMGGIIPVFGKANYAQKFQGRVTIIADESTTTAYMEVRSLRSEDTAVYYCARTDGYGSLDPWGQGTLVTVSS

SEQ ID NO: 1873 - protein, 11 aa, Artificial Sequence
  Description of Artificial Sequence: Synthetic peptide
ARTDGYGSLDP

SEQ ID NO: 1874 - DNA, 337 bp, Artificial Sequence
  Description of Artificial Sequence: Synthetic polynucleotide
  modified_base (40)..(40): a, c, t, g, unknown or other
gatattgtgatgactcagtctccactctccctgcccgtcncccctggagagccggcctccatctcctgcaggtctagtcagagcctcctgcataggaatggatacaactatttggattggtacctgcagaagccagggcagtctccacagctcctgatctatttgggttctaatcgggcctccggggtccctgacaggttcagtggcagtggatcaggcacagattttacactgaaaatcagcagagtggaggctgaggatgttggggtttatttctgcatgcaaactctacaaacgccgctcactttcggcggagggaccaaggtggagatcaaac

SEQ ID NO: 1875 - protein, 112 aa, Artificial Sequence
  Description of Artificial Sequence: Synthetic polypeptide
  MOD_RES (14)..(14): Any amino acid
DIVMTQSPLSLPVXPGEPASISCRSSQSLLHRNGYNYLDWYLQKPGQSPQLLIYLGSNRASGVPDRFSGSGSGTDFTLKISRVEAEDVGVYFCMQTLQTPLTFGGGTKVEIK

SEQ ID NO: 1876 - protein, 9 aa, Artificial Sequence
  Description of Artificial Sequence: Synthetic peptide
MQTLQTPLT

SEQ ID NO: 1877 - DNA, 358 bp, Artificial Sequence
  Description of Artificial Sequence: Synthetic polynucleotide
caggtgcagctggtgcagtctggggctgtactgaagaagcctgggtcctcggtgaaggtctcctgcaaggcttctggaggcaccttcagtaactatgctatccactgggtgcgacaggcccctggacaagggcttgagtggatgggagggatcatccctctctttggtacagcaaactacgcacagaagttccggggcagagtcacgattaccgcggacggctccacgagcacagcctacatggacctgagcagcctcagatcgggggacacggccgtatattactgtgcgcgagagggcggggcaggagcctcccttgactactggggccagggaaccctggtcaccgtctcctcag

SEQ ID NO: 1878 - protein, 119 aa, Artificial Sequence
  Description of Artificial Sequence: Synthetic polypeptide
QVQLVQSGAVLKKPGSSVKVSCKASGGTFSNYAIHWVRQAPGQGLEWMGGIIPLFGTANYAQKFRGRVTITADGSTSTAYMDLSSLRSGDTAVYYCAREGGAGASLDYWGQGTLVTVSS

SEQ ID NO: 1879 - protein, 12 aa, Artificial Sequence
  Description of Artificial Sequence: Synthetic peptide
AREGGAGASLDY

SEQ ID NO: 1880 - DNA, 337 bp, Artificial Sequence
  Description of Artificial Sequence: Synthetic polynucleotide
gatattgtgatgactcagtctccactctccctgcccgtcacccctggagagccggcctccatctcctgcaggtcgagtcagagcctcctgcatagagatggatacaactatttggattggtacctgcagaagccagggcagtctccacagctcctgatctatttgggttctactcgggcctccggagtccctgacaggttcagtggcagtggatcaggcacagattttacactgaaaatcagcagagtggaggctggggatgttggggtttattactgcatgcaagctctacaaactttcaggacttttggccaggggaccacgctggagatcaaac

SEQ ID NO: 1881 - protein, 112 aa, Artificial Sequence
  Description of Artificial Sequence: Synthetic polypeptide
DIVMTQSPLSLPVTPGEPASISCRSSQSLLHRDGYNYLDWYLQKPGQSPQLLIYLGSTRASGVPDRFSGSGSGTDFTLKISRVEAGDVGVYYCMQALQTFRTFGQGTTLEIK

SEQ ID NO: 1882 - protein, 9 aa, Artificial Sequence
  Description of Artificial Sequence: Synthetic peptide
MQALQTFRT

SEQ ID NO: 1883 - DNA, 387 bp, Artificial Sequence
  Description of Artificial Sequence: Synthetic polynucleotide
caggtgcagctgcaggagtcgggcccaggacaggtgaagccttcgcagaccctgtccctcacctgcactgtctctggtgccttaatcagtggtggtggttactactacaactggatccgccagcacccagggaagggcctagagtggattggatacatctactataatgggaccacctcctacaacccgtccctcaagagtcgaattaacatatcaatagacacgtctaagaaccaagtctccctgaagctgagctctgtgactgccgcggacacggccgtgtattactgtgcgaagaatacggtgaacttctacgccaacacctatgactaccactactacgctatggacgtctggggccaagggaccacggtcaccgtctcctca

SEQ ID NO: 1884 - protein, 129 aa, Artificial Sequence
  Description of Artificial Sequence: Synthetic polypeptide
QVQLQESGPGQVKPSQTLSLTCTVSGALISGGGYYYNWIRQHPGKGLEWIGYIYYNGTTSYNPSLKSRINISIDTSKNQVSLKLSSVTAADTAVYYCAKNTVNFYANTYDYHYYAMDVWGQGTTVTVSS

SEQ ID NO: 1885 - protein, 21 aa, Artificial Sequence
  Description of Artificial Sequence: Synthetic peptide
AKNTVNFYANTYDYHYYAMDV

SEQ ID NO: 1886 - DNA, 328 bp, Artificial Sequence
  Description of Artificial Sequence: Synthetic polynucleotide
gaaattgtgttgacgcagtctccaggcaccctgtctttgtcggcaggggaaagagccaccctctcctgcagggccagtcggagtgttagtagcaactacttagcctggtatcagcagaaacctggccaggctcccaggctcctcatctatggtgcatccagcagggccattggcatcccagacaggttcagcggcagtgggtctgggacagagttcactctcaccatcagcagactgcggcctgaagactttgccgtgtattactgtcaccagtatgatggctcacctccgtggacgttcggccaagggaccagggtggaaatcaaac

SEQ ID NO: 1887 - protein, 109 aa, Artificial Sequence
  Description of Artificial Sequence: Synthetic polypeptide
EIVLTQSPGTLSLSAGERATLSCRASRSVSSNYLAWYQQKPGQAPRLLIYGASSRAIGIPDRFSGSGSGTEFTLTISRLRPEDFAVYYCHQYDGSPPWTFGQGTRVEIK

SEQ ID NO: 1888 - protein, 10 aa, Artificial Sequence
  Description of Artificial Sequence: Synthetic peptide
HQYDGSPPWT

SEQ ID NO: 1889 - DNA, 358 bp, Artificial Sequence
  Description of Artificial Sequence: Synthetic polynucleotide
gaggtgcagctggtggagtctgggggaggcttggtacagcctggagggtccctgagactctcctgtgcagcctctggattcagcttcagtacttatgaaatgaactgggtccgccaggctccagggaaggggctggagtgggtggcatatatcagtgacactgggagtaacatatactacgcagactctgtggggggccgattcaccatctccagagacaacgccaagaattcactgtatctgcaaatgagccgcctgagagccgaggacacggctgtttattactgtgcgagagccggaggtggctacaattatcttgaccagtggggccagggaaccctggtcaccgtctcctcag

SEQ ID NO: 1890 - protein, 119 aa, Artificial Sequence
  Description of Artificial Sequence: Synthetic polypeptide
EVQLVESGGGLVQPGGSLRLSCAASGFSFSTYEMNWVRQAPGKGLEWVAYISDTGSNIYYADSVGGRFTISRDNAKNSLYLQMSRLRAEDTAVYYCARAGGGYNYLDQWGQGTLVTVSS

SEQ ID NO: 1891 - protein, 12 aa, Artificial Sequence
  Description of Artificial Sequence: Synthetic peptide
ARAGGGYNYLDQ

SEQ ID NO: 1892 - DNA, 325 bp, Artificial Sequence
  Description of Artificial Sequence: Synthetic polynucleotide
gacatccagatgacccagtctccttccaccctgtctgcatctgtaggagacagagtcaccatcacttgccgggccagtcagaatattgttaggtggttggcctggtatcagcagaagccagggaaagcccctaagctcctgatctataaggcgtctagtttagaaagtggggtcccatcaaggttcagcggcagtggatctggaacagaattcactctcaccatcagcagcctgcagcctgatgattttgcaacttattactgccaacagtataatacttattccaggctcactttcggcggtgggaccaaggtggagatcaaac

SEQ ID NO: 1893 - protein, 108 aa, Artificial Sequence
  Description of Artificial Sequence: Synthetic polypeptide
DIQMTQSPSTLSASVGDRVTITCRASQNIVRWLAWYQQKPGKAPKLLIYKASSLESGVPSRFSGSGSGTEFTLTISSLQPDDFATYYCQQYNTYSRLTFGGGTKVEIK

SEQ ID NO: 1894 - protein, 10 aa, Artificial Sequence
  Description of Artificial Sequence: Synthetic peptide
QQYNTYSRLT

SEQ ID NO: 1895 - DNA, 370 bp, Artificial Sequence
  Description of Artificial Sequence: Synthetic polynucleotide
gaggtgcagctggtggagtctgggggaggcctggtcgagccgggggggtccctgagactctcctgcgcagcctctggattcgatttcagtatctataacatgaagtgggtccgccaggctccagggaaggggctggagtgggtctcttacattagtgatactgctagtttcatatactacgcaaactcagtggggggccgattcaccgtctccagagacaacgccaagaactcactgtatctgcagatgaacagcctgagagccgaggacacggctatctattactgtgcgagagaccgttgtgatactaccggctgctatgccttccttgacttatggggtcagggaaccctagtcaccgtctcctcag

SEQ ID NO: 1896 - protein, 123 aa, Artificial Sequence
  Description of Artificial Sequence: Synthetic polypeptide
EVQLVESGGGLVEPGGSLRLSCAASGFDFSIYNMKWVRQAPGKGLEWVSYISDTASFIYYANSVGGRFTVSRDNAKNSLYLQMNSLRAEDTAIYYCARDRCDTTGCYAFLDLWGQGTLVTVSS

SEQ ID NO: 1897 - protein, 16 aa, Artificial Sequence
  Description of Artificial Sequence: Synthetic peptide
ARDRCDTTGCYAFLDL

SEQ ID NO: 1898 - DNA, 325 bp, Artificial Sequence
  Description of Artificial Sequence: Synthetic polynucleotide
gacatccagatgacccagtctccttccaccctgtctgcatctgtaggagacagagtcaccatcacttgccgggccagtcagagtattagtacctggttggcctggtatcagcagaaaccagggaaggcccctaaactcctgatctataaggcgtctactttagaaagtggggtcccatcaaggttcagcggcggtggatctgggacagacttcactctcaccatcagcagcctgcagcctgatgattttgcaacttattactgtcaacagtataatacttattcagacatcactttcggccctgggaccaaagtggatgtcaaac

SEQ ID NO: 1899 - protein, 108 aa, Artificial Sequence
  Description of Artificial Sequence: Synthetic polypeptide
DIQMTQSPSTLSASVGDRVTITCRASQSISTWLAWYQQKPGKAPKLLIYKASTLESGVPSRFSGGGSGTDFTLTISSLQPDDFATYYCQQYNTYSDITFGPGTKVDVK

SEQ ID NO: 1900 - protein, 10 aa, Artificial Sequence
  Description of Artificial Sequence: Synthetic peptide
QQYNTYSDIT

SEQ ID NO: 1901 - DNA, 358 bp, Artificial Sequence
  Description of Artificial Sequence: Synthetic polynucleotide
caggtgcagctggtggagtctgggggaggcgtggtccagcctgggaggtccctgagactctcctgtgcagcctctggattcaccttcaataactatggcatgcactgggtccgccaggctccaggcaaggggctggagtggctggcttttatatcatatgatggactttatacatactctacagactctgtgaagggccgattcgtcatctccagggacacttccaagaacacgttgtatctgcaaatgaacagcctaagacctgaggacacggctgtgtattactgtgccagagcggccgggtggacagccgccttggactactggggccagggaaccctggtcaccgtctcctcag

SEQ ID NO: 1902 - protein, 119 aa, Artificial Sequence
  Description of Artificial Sequence: Synthetic polypeptide
QVQLVESGGGVVQPGRSLRLSCAASGFTFNNYGMHWVRQAPGKGLEWLAFISYDGLYTYSTDSVKGRFVISRDTSKNTLYLQMNSLRPEDTAVYYCARAAGWTAALDYWGQGTLVTVSS

SEQ ID NO: 1903 - protein, 12 aa, Artificial Sequence
  Description of Artificial Sequence: Synthetic peptide
ARAAGWTAALDY

SEQ ID NO: 1904 - DNA, 323 bp, Artificial Sequence
  Description of Artificial Sequence: Synthetic polynucleotide
gacatccagatgacccagtctccatcctccctgtctgcatctgtaggagacagagtcaccatcacttgccaggcgaatcaagacattaagaattctttaaattggtatcagcagaaaccagggaaagcccctaagctcctgatctacgatgcttccaatttggaaacaggggtcccatcaaggttcaggggaagtgggtctgggacttattttactttcaccatcagcaacctgcagcctgaagatattgcaacatattactgtcaagtatatcataatgtccctccgtacacttttggccaggggaccaagctggagatcaa

SEQ ID NO: 1905 - protein, 107 aa, Artificial Sequence
  Description of Artificial Sequence: Synthetic polypeptide
DIQMTQSPSSLSASVGDRVTITCQANQDIKNSLNWYQQKPGKAPKLLIYDASNLETGVPSRFRGSGSGTYFTFTISNLQPEDIATYYCQVYHNVPPYTFGQGTKLEI

SEQ ID NO: 1906 - protein, 10 aa, Artificial Sequence
  Description of Artificial Sequence: Synthetic peptide
QVYHNVPPYT

SEQ ID NO: 1907 - DNA, 358 bp, Artificial Sequence
  Description of Artificial Sequence: Synthetic polynucleotide
caggtgcagctggtgcagtctggggctgaggtgaagaagcctggggcctcagtgaaggtttcctgcaaggcatctggatacaccttcaccagttactatatgcactgggtgcgacaggcccctgggcaaggacttgactgggtgggaataatcaaccctagtggtggtagcacaagctacgcacagaagttccagggcagagtcaccatgacgacagacacgtccacgagcacagtctacatggaactgagcagcctgagatctgaggacacggccgtgtactactgtgcgagattcgtggctggtaccgcccactttgactgctggggccagggaaccctggtcaccgtctcctcag

SEQ ID NO: 1908 - protein, 119 aa, Artificial Sequence
  Description of Artificial Sequence: Synthetic polypeptide
QVQLVQSGAEVKKPGASVKVSCKASGYTFTSYYMHWVRQAPGQGLDWVGIINPSGGSTSYAQKFQGRVTMTTDTSTSTVYMELSSLRSEDTAVYYCARFVAGTAHFDCWGQGTLVTVSS

SEQ ID NO: 1909 - protein, 12 aa, Artificial Sequence
  Description of Artificial Sequence: Synthetic peptide
ARFVAGTAHFDC

SEQ ID NO: 1910 - DNA, 328 bp, Artificial Sequence
  Description of Artificial Sequence: Synthetic polynucleotide
gacatcgtgatgacccagtctccagactccctggctgtgtctctgggcgagagggccaccatcaactgcaagtccagccagagtgttttatacagctccaacaataagaagtacttaacttggtaccagcagaaaccaggacagcctcctaaggtgctcatttactgggcatctacccgggaatccggggtccctgaccgattcagtggcagcgggtctgggacagatttcactctcaccatcagcagcctgcaggctgaagatgtggcagtttattactgtcagcaatattatagcttcggccaagggacacgactggagattaaac

SEQ ID NO: 1911 - protein, 109 aa, Artificial Sequence
  Description of Artificial Sequence: Synthetic polypeptide
DIVMTQSPDSLAVSLGERATINCKSSQSVLYSSNNKKYLTWYQQKPGQPPKVLIYWASTRESGVPDRFSGSGSGTDFTLTISSLQAEDVAVYYCQQYYSFGQGTRLEIK

SEQ ID NO: 1912 - protein, 5 aa, Artificial Sequence
  Description of Artificial Sequence: Synthetic peptide
QQYYS

SEQ ID NO: 1913 - DNA, 387 bp, Artificial Sequence
  Description of Artificial Sequence: Synthetic polynucleotide
gaggtgcagctggtgcagtctggagcagaagtgaaaaagcccggggagtctctaaagatctcctgtaagggttctggatacagttttgccagctactggatcggctgggtgcgccagatgcccgggaaaggcctggagtggatggggatcatctatcctggagactctgatattagatacagtccgtcattccaaggccaggtcaccatctcagccgacaagtccatcagcaccgccttcttgcagtggagcagcctgaaggcctcggacaccgccatctattactgtgcgagacacgtgggctttttgggacggggaggacacacgcaccacttcttctacggggtggacgtctggggccaagggaccagggtcagcgtctcatca

SEQ ID NO: 1914 - protein, 129 aa, Artificial Sequence
  Description of Artificial Sequence: Synthetic polypeptide
EVQLVQSGAEVKKPGESLKISCKGSGYSFASYWIGWVRQMPGKGLEWMGIIYPGDSDIRYSPSFQGQVTISADKSISTAFLQWSSLKASDTAIYYCARHVGFLGRGGHTHHFFYGVDVWGQGTRVSVSS

SEQ ID NO: 1915 - protein, 22 aa, Artificial Sequence
  Description of Artificial Sequence: Synthetic peptide
ARHVGFLGRGGHTHHFFYGVDV

SEQ ID NO: 1916 - DNA, 322 bp, Artificial Sequence
  Description of Artificial Sequence: Synthetic polynucleotide
gacatccagatgacccagtctccatcttccgtgtctgcatctgtaggagacagagtcaccatcacttgtcgggcgagtcaggatattagcacgtggttggcctggtatcagcagaaaccaggacatcctcctaggctcctgatccattctgtatccagtttgcaaagtggggtcccatcaaggttcagcggcagtggatctgggacagatttcactctcaccatcagcagtctgcagcctgaagattttgcaacttactattgtcaacaggctaacagttttttcctcactttcggcggagggaccaaggtggagatcaaac

SEQ ID NO: 1917 - protein, 107 aa, Artificial Sequence
  Description of Artificial Sequence: Synthetic polypeptide
DIQMTQSPSSVSASVGDRVTITCRASQDISTWLAWYQQKPGHPPRLLIHSVSSLQSGVPSRFSGSGSGTDFTLTISSLQPEDFATYYCQQANSFFLTFGGGTKVEIK

SEQ ID NO: 1918 - protein, 9 aa, Artificial Sequence
  Description of Artificial Sequence: Synthetic peptide
QQANSFFLT

SEQ ID NO: 1919 - DNA, 364 bp, Artificial Sequence
  Description of Artificial Sequence: Synthetic polynucleotide
caggtgcagctggtggagtctgggggaggcgtggtccagcctgggaggtccctgagactctcctgtgcagcctctggattcaccttcattaactatgctatccactgggtccgccaggctccaggcaaggggctggagtgggtggcagttatatcatatgatggaagcaataaatactacgcagactccgtgaagggccgattcaccatctccagagacaattccaagaacacgctgtatctgcaaatgaacagcctgagagctgaggacacggctgtatattactgtgcgagaggggaggtctttagcagtggctggcccattgactactggggccagggaaccctggtcaccgtctcctcag

SEQ ID NO: 1920 - protein, 121 aa, Artificial Sequence
  Description of Artificial Sequence: Synthetic polypeptide
QVQLVESGGGVVQPGRSLRLSCAASGFTFINYAIHWVRQAPGKGLEWVAVISYDGSNKYYADSVKGRFTISRDNSKNTLYLQMNSLRAEDTAVYYCARGEVFSSGWPIDYWGQGTLVTVSS

SEQ ID NO: 1921 - protein, 14 aa, Artificial Sequence
  Description of Artificial Sequence: Synthetic peptide
ARGEVFSSGWPIDY

SEQ ID NO: 1922 - DNA, 340 bp, Artificial Sequence
  Description of Artificial Sequence: Synthetic polynucleotide
gacatcgtgatgacccagtctccagactccctggctgtgtctctgggcgagagggccaccatcaactgcaagtccagccagagggttttatacagctccaacaataagaactacttagcttggtaccagcagaaaccaggacagcctcctaagctgctcatttactgggcatctacccgggaatccggggtccctgaccgattcagtggcagcgggtctgggacagatttcactctcaccatcagcagcctgcaggctgaagatgtggcagtttattactgtcagcaatattatagtactccgatcaccttcggccaagggacacgactggagattaaac

SEQ ID NO: 1923 - protein, 113 aa, Artificial Sequence
  Description of Artificial Sequence: Synthetic polypeptide
DIVMTQSPDSLAVSLGERATINCKSSQRVLYSSNNKNYLAWYQQKPGQPPKLLIYWASTRESGVPDRFSGSGSGTDFTLTISSLQAEDVAVYYCQQYYSTPITFGQGTRLEIK

SEQ ID NO: 1924 - protein, 9 aa, Artificial Sequence
  Description of Artificial Sequence: Synthetic peptide
QQYYSTPIT

SEQ ID NO: 1925 - DNA, 367 bp, Artificial Sequence
  Description of Artificial Sequence: Synthetic polynucleotide
caggtgcagctggtggagtctgggggaggcgtggtccagcctgggaggtccctgagactcccctgtgcagcgtcaggatttaccttcagtgactatggcatgcactgggtccgccaggttccaggcaaggggctggagtggctgggtcttatatggcatgatggaagtgtcgaccactatgcagactccgtgaagggccgattcactatctccagagacaattccaagaacacagtgtatctgcaaatcaacagcctgagagtcgaggacacggctatatactactgtgcgagagatttagacaggcgggggagcagttcgccttttgactcctggggccagggaaccctggtcaccgtctcctcag

SEQ ID NO: 1926 - protein, 122 aa, Artificial Sequence
  Description of Artificial Sequence: Synthetic polypeptide
QVQLVESGGGVVQPGRSLRLPCAASGFTFSDYGMHWVRQVPGKGLEWLGLIWHDGSVDHYADSVKGRFTISRDNSKNTVYLQINSLRVEDTAIYYCARDLDRRGSSSPFDSWGQGTLVTVSS

SEQ ID NO: 1927 - protein, 15 aa, Artificial Sequence
  Description of Artificial Sequence: Synthetic peptide
ARDLDRRGSSSPFDS

SEQ ID NO: 1928 - DNA, 322 bp, Artificial Sequence
  Description of Artificial Sequence: Synthetic polynucleotide
gaaattgtgttgacacagtctccagccaccctgtctttgtctccaggggaaagagccaccctctcctgcagggccagtcagagtattagcaactacttagcctggtaccaacagaaacctggccagcctcccaggctcctcatctatgatgcatccaacagggccactggcatcccagccaggttcagtggcagtgggtctgggacagacttcactctcaccatcagcagcctagagcctgaagattttgcagtttattactgtcagcagcgtgacaactggcctctcactttcggcggagggaccaaggtggagatcaaac

SEQ ID NO: 1929 - protein, 107 aa, Artificial Sequence
  Description of Artificial Sequence: Synthetic polypeptide
EIVLTQSPATLSLSPGERATLSCRASQSISNYLAWYQQKPGQPPRLLIYDASNRATGIPARFSGSGSGTDFTLTISSLEPEDFAVYYCQQRDNWPLTFGGGTKVEIK

SEQ ID NO: 1930 - protein, 9 aa, Artificial Sequence
  Description of Artificial Sequence: Synthetic peptide
QQRDNWPLT

SEQ ID NO: 1931 - DNA, 346 bp, Artificial Sequence
  Description of Artificial Sequence: Synthetic polynucleotide
gaggtgcagctggtggagtctgggggaggcttggtacagcctggggggtccctgagactctcctgtgcagcctctggattcagcttcagcacctatgctatgaactgggtccgccaggctccagggaaggggctggagtggattgcatacatcagtgatactagtagtcagaactttgtgaggggccgattcaccgtgtccagagacaataccaagaactctctgtttctgcaaatgaacagcctgagagacgaggacaccgctgtctattactgtgcgagagcctcgcggtcctacaatttctttgacttctggggccagggaaccctggtctccgtctcctcag

SEQ ID NO: 1932 - protein, 115 aa, Artificial Sequence
  Description of Artificial Sequence: Synthetic polypeptide
EVQLVESGGGLVQPGGSLRLSCAASGFSFSTYAMNWVRQAPGKGLEWIAYISDTSSQNFVRGRFTVSRDNTKNSLFLQMNSLRDEDTAVYYCARASRSYNFFDFWGQGTLVSVSS

SEQ ID NO: 1933 - protein, 12 aa, Artificial Sequence
  Description of Artificial Sequence: Synthetic peptide
ARASRSYNFFDF

SEQ ID NO: 1934 - DNA, 325 bp, Artificial Sequence
  Description of Artificial Sequence: Synthetic polynucleotide
gacatccagatgacccagtctccttccaccctgtctgcttctgtaggagacagaatcaccatcacttgccgggccagtgagagtattaggacttggttggcctggtatcagcagaaaccagggaaagcccctaaactcctgatctataaggcgtctaatttagaagatggggtcccatcaagattcagcggcagtggatctgagacaagattcactctcaccatcagcagcctgcagcctgatgattttgcaacttattactgccaacagtataatacttactctcaggttactttcggcggagggaccaaggtcgagatcaaac

SEQ ID NO: 1935 - protein, 108 aa, Artificial Sequence
  Description of Artificial Sequence: Synthetic polypeptide
DIQMTQSPSTLSASVGDRITITCRASESIRTWLAWYQQKPGKAPKLLIYKASNLEDGVPSRFSGSGSETRFTLTISSLQPDDFATYYCQQYNTYSQVTFGGGTKVEIK

SEQ ID NO: 1936 - protein, 10 aa, Artificial Sequence
  Description of Artificial Sequence: Synthetic peptide
QQYNTYSQVT

SEQ ID NO: 1937 - DNA, 367 bp, Artificial Sequence
  Description of Artificial Sequence: Synthetic polynucleotide
caggtgcagctggtgcagtctggggctgaggtgaagaagcctggggcctcagtgaaggttgcctgcaaggcatctggatacagtttcaccagctattatatgcactgggtgcgacaggcccctggacaagggcctgagtggatggggatcatcaaccctagtggtgggagcagcagttacgcacagaaattgcagggcagagtcaccatgaccagggacacgtccacgagcacagtctacatggagttggccagcctgagatctgaagacacggccgtatattactgtgcgagagtgagggcccccacggggtcggggtgggcctttgatatctggggccaagggacaatggtcaccgtctcctcag

SEQ ID NO: 1938 - protein, 122 aa, Artificial Sequence
  Description of Artificial Sequence: Synthetic polypeptide
QVQLVQSGAEVKKPGASVKVACKASGYSFTSYYMHWVRQAPGQGPEWMGIINPSGGSSSYAQKLQGRVTMTRDTSTSTVYMELASLRSEDTAVYYCARVRAPTGSGWAFDIWGQGTMVTVSS

SEQ ID NO: 1939 - protein, 15 aa, Artificial Sequence
  Description of Artificial Sequence: Synthetic peptide
ARVRAPTGSGWAFDI

SEQ ID NO: 1940 - DNA, 310 bp, Artificial Sequence
  Description of Artificial Sequence: Synthetic polynucleotide
gaaatagtgatgacgcagtctccagccaccctgtctctgtctccaggggaaagagccaccctctcctgcagggccagtcagagtcttagcagcaacttggcctggtaccagcagaaacctggccaggctcccaggctcctcatctatggtgcatccaccagggccactggtgtcccagccaggttcagtggcagtgggtctgggacagagttcaccctcaccatcagcagcctgcaggctgaagattcagcagtttattactgtcagcagttcagtaactggggccaggggaccaagctggagatcaaac

SEQ ID NO: 1941 - protein, 103 aa, Artificial Sequence
  Description of Artificial Sequence: Synthetic polypeptide
EIVMTQSPATLSLSPGERATLSCRASQSLSSNLAWYQQKPGQAPRLLIYGASTRATGVPARFSGSGSGTEFTLTISSLQAEDSAVYYCQQFSNWGQGTKLEIK

SEQ ID NO: 1942 - skipped

SEQ ID NO: 1943 - DNA, 356 bp, Artificial Sequence
  Description of Artificial Sequence: Synthetic polynucleotide
gaggtgcagctggtggagtctgggggaggcttggtacagcctggagggtccctgagactctcctgtgcagcctctggattcaccttcagtagttatgaaatgaactgggtccgccaggctccagggaaggggctggagtgggtctcatacattagtgacagtggcagtagtctgtactacaaagactctctggagggccgattcaccatctccagagacaacgccaagaactcactgtttctgcagatgaacagcctgagagccgaggacacggctgtttattactgtgcgagagccgggaaccactacaactactttgacttctggggccagggaaccctggtcaccgtctcctc

SEQ ID NO: 1944 - protein, 118 aa, Artificial Sequence
  Description of Artificial Sequence: Synthetic polypeptide
EVQLVESGGGLVQPGGSLRLSCAASGFTFSSYEMNWVRQAPGKGLEWVSYISDSGSSLYYKDSLEGRFTISRDNAKNSLFLQMNSLRAEDTAVYYCARAGNHYNYFDFWGQGTLVTVS

SEQ ID NO: 1945 - protein, 12 aa, Artificial Sequence
  Description of Artificial Sequence: Synthetic peptide
ARAGNHYNYFDF

SEQ ID NO: 1946 - DNA, 325 bp, Artificial Sequence
  Description of Artificial Sequence: Synthetic polynucleotide
gacatccagatgacccagtctccttccaccctgtctgcatctgtcggagacagagtcaccatcacttgccgggccagtcagagtattggtaggtggttggcctggtatcaccagaaaccaggaaaagcccctaagctcctgatctataaggcgtctaacttagaaagtggggtcccatcaaggttcagcggcagtggatccgggacagaattcactctcatcatcagcagcctgcagcctgatgattttgcaacttattactgccaacagtataatactttctctgctgtcactttcggcggagggaccaaggtgcagatcaaac

SEQ ID NO: 1947 - protein, 108 aa, Artificial Sequence
  Description of Artificial Sequence: Synthetic polypeptide
DIQMTQSPSTLSASVGDRVTITCRASQSIGRWLAWYHQKPGKAPKLLIYKASNLESGVPSRFSGSGSGTEFTLIISSLQPDDFATYYCQQYNTFSAVTFGGGTKVQIK

SEQ ID NO: 1948 - protein, 10 aa, Artificial Sequence
  Description of Artificial Sequence: Synthetic peptide
QQYNTFSAVT

SEQ ID NO: 1949 - DNA, 358 bp, Artificial Sequence
  Description of Artificial Sequence: Synthetic polynucleotide
gaggtgcagctggtggagtctgggggaggcttggtacagcctggagggtccctaagactctcctgtgcagcctctggattcaccttcagtagttatgaaatgaactgggtccgccaggctccagggaaggggctggagtggctttcatacattagtgacagtggtagttccatatactacgcagactctgtgaagggccgattcaccatttccagagacaacgccaagaactcactgtatctgcaaatgaacagcctgagagccgaggacacggctgtttattattgtacgagaaatcaggataactggagctacttctactactggggccagggaaccctggtcaccgtctcctcag

SEQ ID NO: 1950 - protein, 119 aa, Artificial Sequence
  Description of Artificial Sequence: Synthetic polypeptide
EVQLVESGGGLVQPGGSLRLSCAASGFTFSSYEMNWVRQAPGKGLEWLSYISDSGSSIYYADSVKGRFTISRDNAKNSLYLQMNSLRAEDTAVYYCTRNQDNWSYFYYWGQGTLVTVSS

SEQ ID NO: 1951 - protein, 12 aa, Artificial Sequence
  Description of Artificial Sequence: Synthetic peptide
TRNQDNWSYFYY

SEQ ID NO: 1952 - DNA, 325 bp, Artificial Sequence
  Description of Artificial Sequence: Synthetic polynucleotide
gacatccagatgacccagtctccttccaccctgtctgcatctgtaggagacagagtcaccatcacttgccggaccagtcagagtattagcagctggttggcctggtatcagcagaaaccagggaaagcccctaagctcctgatctataaggcgtctagtttagcaagtggggtcccatcaaggttcagcggcagtggatctgggacagaattcactctcaccatcagcagcctgcagcctgatgattttgcatcttattactgccaacaatataatacttattccgcgctcactttcggcggagggaccaaggtggagatcaaac

SEQ ID NO: 1953 - protein, 108 aa, Artificial Sequence
  Description of Artificial Sequence: Synthetic polypeptide
DIQMTQSPSTLSASVGDRVTITCRTSQSISSWLAWYQQKPGKAPKLLIYKASSLASGVPSRFSGSGSGTEFTLTISSLQPDDFASYYCQQYNTYSALTFGGGTKVEIK

SEQ ID NO: 1954 - protein, 10 aa, Artificial Sequence
  Description of Artificial Sequence: Synthetic peptide
QQYNTYSALT

SEQ ID NO: 1955 - DNA, 364 bp, Artificial Sequence
  Description of Artificial Sequence: Synthetic polynucleotide
caggtgcagctggtggagtctgggggaggcgtagtccagcctgggaggtccctgagactctcctgtgcagcctctggattcaccttcagtagctttggcatgcactgggtccgccaggctccaggcaaggggctggactgggtggcagttatatcaaatgatggaaataataaagagtatggagactccgtgaagggccgattcaccatctccagagacaattccaagaacacgctgtatctggaaatgaacagcctgagacctgaggacacggctgtgtaccattgtgcgaaggatcatgcgcagtggatagacaactggttcgacccctggggccagggaaccctggtcaccgtctcctcag

SEQ ID NO: 1956 - protein, 121 aa, Artificial Sequence
  Description of Artificial Sequence: Synthetic polypeptide
QVQLVESGGGVVQPGRSLRLSCAASGFTFSSFGMHWVRQAPGKGLDWVAVISNDGNNKEYGDSVKGRFTISRDNSKNTLYLEMNSLRPEDTAVYHCAKDHAQWIDNWFDPWGQGTLVTVSS

SEQ ID NO: 1957 - protein, 14 aa, Artificial Sequence
  Description of Artificial Sequence: Synthetic peptide
AKDHAQWIDNWFDP

SEQ ID NO: 1958 - DNA, 322 bp, Artificial Sequence
  Description of Artificial Sequence: Synthetic polynucleotide
gaaatagtgatgacgcagtctccagccaccctgtctgtgtctccaggggaaagagccaccctctcctgcagggccagtcagagtgttaccagcaacttagcctggtatcagcagaaagctggccaggctcccaggctcctcatccatggtacagccaccagggccactggcatcccagccaggttcagtggcagtgggtctgagacagagttcactctcaccatcagcagcctgcagtctgaagattttgcagtttattactgtcagcaatataataactggccgctcactttcggcggagggaccaaggtggagatcaaac

SEQ ID NO: 1959 - protein, 107 aa, Artificial Sequence
  Description of Artificial Sequence: Synthetic polypeptide
EIVMTQSPATLSVSPGERATLSCRASQSVTSNLAWYQQKAGQAPRLLIHGTATRATGIPARFSGSGSETEFTLTISSLQSEDFAVYYCQQYNNWPLTFGGGTKVEIK

SEQ ID NO: 1960 - protein, 9 aa, Artificial Sequence
  Description of Artificial Sequence: Synthetic peptide
QQYNNWPLT

SEQ ID NO: 1961 - DNA, 358 bp, Artificial Sequence
  Description of Artificial Sequence: Synthetic polynucleotide
caggtgcagctggtggagtctgggggaggcgtggtccagcctgggaggtccctgagactctcctgtgcagcctctggattcaccttcagtcactatgccatgcactgggtccgccaggctccaggcaaggggttggagtgggtggcagttataacatatgatggaagtaattcattttatgcaacctccgtgaagggccgattcaccatctccagagacagatccaagaatacggtgtctctgcaaatgaacaacctgggacctgaggacacggctatctattattgtgcgaaagaaggggggggttctggggctaatgattactggggccagggaaccctggtcaccgtctcctcag

SEQ ID NO: 1962 - protein, 119 aa, Artificial Sequence
  Description of Artificial Sequence: Synthetic polypeptide
QVQLVESGGGVVQPGRSLRLSCAASGFTFSHYAMHWVRQAPGKGLEWVAVITYDGSNSFYATSVKGRFTISRDRSKNTVSLQMNNLGPEDTAIYYCAKEGGGSGANDYWGQGTLVTVSS

SEQ ID NO: 1963 - protein, 12 aa, Artificial Sequence
  Description of Artificial Sequence: Synthetic peptide
AKEGGGSGANDY

SEQ ID NO: 1964 - DNA, 322 bp, Artificial Sequence
  Description of Artificial Sequence: Synthetic polynucleotide
gacatccagatgacccagtctccttccaccctgtctgcatctgtcggagacagagtcaccatcacttgccgggccagtcagagtgttagtacctggttggcctggtatcagcagaaaccagggaaagtccctgagctcctcatctctaagacgtctgatttagaaagtggggtcccatcacggttcagcggcagtggatctgggacagaattcactctcaccatcaccagcctgcagcctgatgattttgcaacttattactgccaacagtataatagatacccgtggaggttcggccaagggaccaaggtggaaatcaaac

SEQ ID NO: 1965 - protein, 107 aa, Artificial Sequence
  Description of Artificial Sequence: Synthetic polypeptide
DIQMTQSPSTLSASVGDRVTITCRASQSVSTWLAWYQQKPGKVPELLISKTSDLESGVPSRFSGSGSGTEFTLTITSLQPDDFATYYCQQYNRYPWRFGQGTKVEIK

SEQ ID NO: 1966 - protein, 9 aa, Artificial Sequence
  Description of Artificial Sequence: Synthetic peptide
QQYNRYPWR

SEQ ID NO: 1967 - DNA, 355 bp, Artificial Sequence
  Description of Artificial Sequence: Synthetic polynucleotide
caggtgcagctggtgcagtctggggctgaggtgaagaagcctgggtcctcggtgaaggtctcctgcaaggcttctggaggcaacttcggcaactatgaaatcgtctgggtgcgacaggcccctggacaaggccttgagtgtatgggagggatcatccctttctttcgtacaccaaacttcgcacagaagttccagggcagattcactatcaccgcggacgaatccacgagcacagcctacatggagctggacagcctgagatctgacgacacggccgtctattactgtgcgagacgggggggttatgggtccttagacgactggggccagggaaccttggtcaccgtctcctcag

SEQ ID NO: 1968 - protein, 118 aa, Artificial Sequence
  Description of Artificial Sequence: Synthetic polypeptide
QVQLVQSGAEVKKPGSSVKVSCKASGGNFGNYEIVWVRQAPGQGLECMGGIIPFFRTPNFAQKFQGRFTITADESTSTAYMELDSLRSDDTAVYYCARRGGYGSLDDWGQGTLVTVSS

SEQ ID NO: 1969 - protein, 11 aa, Artificial Sequence
  Description of Artificial Sequence: Synthetic peptide
ARRGGYGSLDD

SEQ ID NO: 1970 - DNA, 337 bp, Artificial Sequence
  Description of Artificial Sequence: Synthetic polynucleotide
gatattgtgatgactcagtctccactctccctgcccgtcacccctggagagccggcctccatctcctgcaggtctagtcagagcctcctgcatagtactggatacaactatttggattggtatctgcagaagccagggcagtctccacagctcctgatctatttgggttctaatcgggcctccggggtccctgacaggttcagtggcagtggatcaggcacagattttacactgaaaatcagcagagtggaggctgaggatgttggggtatattactgcatgcaagctctacaaactcctcccaccttcggccaagggacacgactggagattaaac

SEQ ID NO: 1971 - protein, 112 aa, Artificial Sequence
  Description of Artificial Sequence: Synthetic polypeptide
DIVMTQSPLSLPVTPGEPASISCRSSQSLLHSTGYNYLDWYLQKPGQSPQLLIYLGSNRASGVPDRFSGSGSGTDFTLKISRVEAEDVGVYYCMQALQTPPTFGQGTRLEIK

SEQ ID NO: 1972 - protein, 9 aa, Artificial Sequence
  Description of Artificial Sequence: Synthetic peptide
MQALQTPPT

SEQ ID NO: 1973 - DNA, 358 bp, Artificial Sequence
  Description of Artificial Sequence: Synthetic polynucleotide
gaggtgcagctggtggagtctgggggaggcttggtacagcctggagggtccctgagactctcctgtgcagcctctggattcaccttcagtagttatgaaatgaactgggtccgccaggctccagggaaggggctggagtggatctcatacattagtgatagtgctagtagcatatactacacagactctgtgaagggccgattcaccatctccagagacaacgccaagaactcactgtttctgcaaatgaacagcctgagcgtcgaggacacggctgtctattactgtgcgagagctggaaatggctacaattaccttgactactggggccagggaaccctggtcaccgtctcctcag

SEQ ID NO: 1974 - protein, 119 aa, Artificial Sequence
  Description of Artificial Sequence: Synthetic polypeptide
EVQLVESGGGLVQPGGSLRLSCAASGFTFSSYEMNWVRQAPGKGLEWISYISDSASSIYYTDSVKGRFTISRDNAKNSLFLQMNSLSVEDTAVYYCARAGNGYNYLDYWGQGTLVTVSS

SEQ ID NO: 1975 - protein, 12 aa, Artificial Sequence
  Description of Artificial Sequence: Synthetic peptide
ARAGNGYNYLDY

SEQ ID NO: 1976 - DNA, 325 bp, Artificial Sequence
  Description of Artificial Sequence: Synthetic polynucleotide
gacatccagatgacccagtctccttccaccctgtctgcatctgtgggagacagagtcaccatcacttgccgggccagtcagagtattagtacctggttggcctggtatcagcagaaaccagggaaagcccctaaactcctgatctataaggcgtctactttagaaagtggggtcccatcaaggttcagcggcagtggatctgagacaaaattcactctcaccatcaccagcctgcagcctgatgattttgcaacttattactgccaacagtataatactttttctctgttgacgttcggccaagggaccaaggtggaaatcaaac

SEQ ID NO: 1977 - protein, 108 aa, Artificial Sequence
  Description of Artificial Sequence: Synthetic polypeptide
DIQMTQSPSTLSASVGDRVTITCRASQSISTWLAWYQQKPGKAPKLLIYKASTLESGVPSRFSGSGSETKFTLTITSLQPDDFATYYCQQYNTFSLLTFGQGTKVEIK

SEQ ID NO: 1978 - protein, 10 aa, Artificial Sequence
  Description of Artificial Sequence: Synthetic peptide
QQYNTFSLLT

SEQ ID NO: 1979 - DNA, 355 bp, Artificial Sequence
  Description of Artificial Sequence: Synthetic polynucleotide
caggtgcagctggtgcagtctggggctgaggtgaagaagcctgggtcctcggttaaggtctcctgcaaggcttctggaggcaccttcagtacctttgaaatcagctgggtgcgacaggcccctggacaagggcttgagtggatgggagggatcatccctgtctttggtacagcgacctccgcacaaaagttccaggccagagtcacaataaccgcggacgaatccacgagcacagtctacatggagctgagcagcctgagatccgacgacacggccgtctattactgtgcgagactgggggggtacagtggctacgattcttggggacagggaaccctggtcgtcgtctcctcag

SEQ ID NO: 1980 - protein, 118 aa, Artificial Sequence
  Description of Artificial Sequence: Synthetic polypeptide
QVQLVQSGAEVKKPGSSVKVSCKASGGTFSTFEISWVRQAPGQGLEWMGGIIPVFGTATSAQKFQARVTITADESTSTVYMELSSLRSDDTAVYYCARLGGYSGYDSWGQGTLVVVSS

SEQ ID NO: 1981 - protein, 11 aa, Artificial Sequence
  Description of Artificial Sequence: Synthetic peptide
ARLGGYSGYDS

SEQ ID NO: 1982 - DNA, 337 bp, Artificial Sequence
  Description of Artificial Sequence: Synthetic polynucleotide
gatattgtgatgactcagtctccactctccctgtccgtcacccctggagagccggcctccatctcctgcaggtctagtcagagcctcctgcatagtaatgggtacaactatttggattggtacctgcagaagccagggcagtctccacaactcctgatctatttgggttctactcgggcctccggggtccctgacaggttcagtggccatggatcaggcacagattttacactgaaaatcagcagagtggaggctgaggatgttggggtttattactgcatgcaacctctacaaactccccgcagttttggccaggggaccaagctggagatcaaac

SEQ ID NO: 1983 - protein, 112 aa, Artificial Sequence
  Description of Artificial Sequence: Synthetic polypeptide
DIVMTQSPLSLSVTPGEPASISCRSSQSLLHSNGYNYLDWYLQKPGQSPQLLIYLGSTRASGVPDRFSGHGSGTDFTLKISRVEAEDVGVYYCMQPLQTPRSFGQGTKLEIK

SEQ ID NO: 1984 - protein, 9 aa, Artificial Sequence
  Description of Artificial Sequence: Synthetic peptide
MQPLQTPRS

SEQ ID NO: 1985 - DNA, 358 bp, Artificial Sequence
  Description of Artificial Sequence: Synthetic polynucleotide
caggtgcagctggtggagtctgggggaggcgtggtccagcctgggaggtccctgagactctcctgtgcagcctctgcattcaccttcagtcactatggcatgcactgggtccgccaggctccaggcaaggggctggagtgggtggcatttatatcatatgatggaacttatacataccatgcagagtccgtgaagggccgattcaccatctccagagacaattccaagaatacactatatctgcaaatgaacagcctgagcgctgaggacacggctgtgtatttctgtgcgaaagcggcggggtgggcagccgcccttgactactggggccagggaaccctggtcaccgtctcctcag

SEQ ID NO: 1986 - protein, 119 aa, Artificial Sequence
  Description of Artificial Sequence: Synthetic polypeptide
QVQLVESGGGVVQPGRSLRLSCAASAFTFSHYGMHWVRQAPGKGLEWVAFISYDGTYTYHAESVKGRFTISRDNSKNTLYLQMNSLSAEDTAVYFCAKAAGWAAALDYWGQGTLVTVSS

SEQ ID NO: 1987 - protein, 12 aa, Artificial Sequence
  Description of Artificial Sequence: Synthetic peptide
AKAAGWAAALDY

SEQ ID NO: 1988 - DNA, 325 bp, Artificial Sequence
  Description of Artificial Sequence: Synthetic polynucleotide
gacatccagatgacccagtctccatcctccctgtctgcatctgtaggagacagagtcaccatcacttgccaggcgagtcagggcattagcaactctttaaattggtatcagcagaaaccagggaaagcccctaagctcctgatctacggtgcatccaatttggacacaggggtcccatctaggttcagtggaagtggatctgggacagattttactttcaccatcagcagcctgcagcctgaagattttgcaacatattactgtcaaaaatatgataatctccctccgtacagttttggccaggggaccaagctggagatcaaac

SEQ ID NO: 1989 - protein, 108 aa, Artificial Sequence
  Description of Artificial Sequence: Synthetic polypeptide
DIQMTQSPSSLSASVGDRVTITCQASQGISNSLNWYQQKPGKAPKLLIYGASNLDTGVPSRFSGSGSGTDFTFTISSLQPEDFATYYCQKYDNLPPYSFGQGTKLEIK

SEQ ID NO: 1990 - protein, 10 aa, Artificial Sequence
  Description of Artificial Sequence: Synthetic peptide
QKYDNLPPYS

SEQ ID NO: 1991 - DNA, 358 bp, Artificial Sequence
  Description of Artificial Sequence: Synthetic polynucleotide
gaggtgcagctggtggagtctgggggaggcttggtacagcctggggggtccctgagactctcctgtgcagcctctggtttcaccttcaatacttatgccatgaactgggtccgccaggctccagggaaggggctggagtgggttgcatacattagcagtggtagtagtgaaatgtattatgcagactctgtgaagggccgattcaccatctccagagacgatgccaagaactcactgtatctgcacatgagaagcctgagagacgaggacacggctgtctattactgtgcgagagtctcgcggtcctacaatttctttgactactggggccagggaaccctggtcaccgtctcctcag

SEQ ID NO: 1992 - protein, 119 aa, Artificial Sequence
  Description of Artificial Sequence: Synthetic polypeptide
EVQLVESGGGLVQPGGSLRLSCAASGFTFNTYAMNWVRQAPGKGLEWVAYISSGSSEMYYADSVKGRFTISRDDAKNSLYLHMRSLRDEDTAVYYCARVSRSYNFFDYWGQGTLVTVSS

SEQ ID NO: 1993 - protein, 12 aa, Artificial Sequence
  Description of Artificial Sequence: Synthetic peptide
ARVSRSYNFFDY

SEQ ID NO: 1994 - DNA, 325 bp, Artificial Sequence
  Description of Artificial Sequence: Synthetic polynucleotide
gacatccagatgacccagtctccttccaccctgtctgcatctgtgggagacagagtcaccatcacttgccgggccagtcagactattagtaggtggttggcctggtatcagcagaagccagggaaagcccctaaactcctcatctataaggcgtctactttagaaagtggggtcccatcaaggttcagcggcagtggatctgggacacaattcactctcaccatcagcagcctgcagcctgatgattttgcaacctactactgccaacagtataatacttattctgaggtcactttcggcggagggaccaaggtggagattaaac

SEQ ID NO: 1995 - protein, 108 aa, Artificial Sequence
  Description of Artificial Sequence: Synthetic polypeptide
DIQMTQSPSTLSASVGDRVTITCRASQTISRWLAWYQQKPGKAPKLLIYKASTLESGVPSRFSGSGSGTQFTLTISSLQPDDFATYYCQQYNTYSEVTFGGGTKVEIK

SEQ ID NO: 1996 - protein, 10 aa, Artificial Sequence
  Description of Artificial Sequence: Synthetic peptide
QQYNTYSEVT

SEQ ID NO: 1997 - DNA, 358 bp, Artificial Sequence
  Description of Artificial Sequence: Synthetic polynucleotide
gaggtgcagctggtggagtctgggggaggcttggtacagcctggggggtccctgacactctcctgtgcagcctctggattcaccttcagtgactatgccatgaactgggtccgccaggctccaggaaaggaactggaatgggtttcttacattagtactggaagtagtaccaaatattactcaggcactgtgaggggccgactcaccatctccagagacgatgccaagaactcactgtatcttcaaatagacaacctgagagacgagggcacggctgtgtattactgtgcgagagcctcgcggtcctacaatttctttgactactggggccagggaatcctggtcaccgtctcctcag

SEQ ID NO: 1998 - protein, 119 aa, Artificial Sequence
  Description of Artificial Sequence: Synthetic polypeptide
EVQLVESGGGLVQPGGSLTLSCAASGFTFSDYAMNWVRQAPGKELEWVSYISTGSSTKYYSGTVRGRLTISRDDAKNSLYLQIDNLRDEGTAVYYCARASRSYNFFDYWGQGILVTVSS

SEQ ID NO: 1999 - protein, 12 aa, Artificial Sequence
  Description of Artificial Sequence: Synthetic peptide
ARASRSYNFFDY

SEQ ID NO: 2000 - DNA, 325 bp, Artificial Sequence
  Description of Artificial Sequence: Synthetic polynucleotide
gacatccagatgacccagtctccttccaccctgtctgcatctgtaggagacagagtcaccatcacttgccgggccagtcaatatattagtagctggttggcctggtatcagcagaaaccagggaaagcccctaaactcctgatctataaggcgtctaatttagaaagtggggtcccatcaaggttcagtggcagtggatctgggacagatttcattctcaccatcagcagcctgcagcctgatgattttgcaacttattactgccaacagtataatacttattctcaggtcactttcggcggagggaccaaggtggagatcaaac

SEQ ID NO: 2001 - protein, 108 aa, Artificial Sequence
  Description of Artificial Sequence: Synthetic polypeptide
DIQMTQSPSTLSASVGDRVTITCRASQYISSWLAWYQQKPGKAPKLLIYKASNLESGVPSRFSGSGSGTDFILTISSLQPDDFATYYCQQYNTYSQVTFGGGTKVEIK

SEQ ID NO: 2002 - protein, 10 aa, Artificial Sequence
  Description of Artificial Sequence: Synthetic peptide
QQYNTYSQVT

SEQ ID NO: 2003 - DNA, 358 bp, Artificial Sequence
  Description of Artificial Sequence: Synthetic polynucleotide
caggtgcagctggtgcagtctggggctgaggtgaagaagcctgggtcctcggtgagggtctcctgcaaggcttctggaggcagcttcagcaactatgatattagttgggttcgacaggcccctggacaagggcttgagtggatgggaggaatcatccctgcctttcgtacagcgaactacgcacagaaattccagggcagagtcacgattaccgcggacgaatacacgagcacagtctacatgaagctgaacagcctgagatctgacgacacggccctgtattactgtgcgagagatggaggggctatagcagcttttgatacctggggccaagggacaatggtcaccgtctcttcag

SEQ ID NO: 2004 - protein, 119 aa, Artificial Sequence
  Description of Artificial Sequence: Synthetic polypeptide
QVQLVQSGAEVKKPGSSVRVSCKASGGSFSNYDISWVRQAPGQGLEWMGGIIPAFRTANYAQKFQGRVTITADEYTSTVYMKLNSLRSDDTALYYCARDGGAIAAFDTWGQGTMVTVSS

SEQ ID NO: 2005 - protein, 12 aa, Artificial Sequence
  Description of Artificial Sequence: Synthetic peptide
ARDGGAIAAFDT

SEQ ID NO: 2006 - DNA, 337 bp, Artificial Sequence
  Description of Artificial Sequence: Synthetic polynucleotide
gatattgtgatgactcagtctccactctccctgcccgtcacccctggagagccggcctccatctcctgcaggtccagtcagagcctcctgcatagggatggaaacaactatttgaattggtacctgcagaggccagggcagtctccacagctcctgatctatttgggttctactcgggcctccggggtccctgacaggttcagtggcagtggatcaggcgcagattttacactgaaaatcagcagagtggaggctgaggatgttggggtttatttctgcatgcaatctgtacaaactcctcggacgttcggccaagggaccaaggtggaaatcaaac

SEQ ID NO: 2007 - protein, 112 aa, Artificial Sequence
  Description of Artificial Sequence: Synthetic polypeptide
DIVMTQSPLSLPVTPGEPASISCRSSQSLLHRDGNNYLNWYLQRPGQSPQLLIYLGSTRASGVPDRFSGSGSGADFTLKISRVEAEDVGVYFCMQSVQTPRTFGQGTKVEIK

SEQ ID NO: 2008 - protein, 9 aa, Artificial Sequence
  Description of Artificial Sequence: Synthetic peptide
MQSVQTPRT

SEQ ID NO: 2009 - DNA, 361 bp, Artificial Sequence
  Description of Artificial Sequence: Synthetic polynucleotide
caggtgcagctggtggagtctgggggaggcgtggtccagcctgggaggtccctgagactctcctgtgcagcctctggattcagcctcagtagtcatggcatgcactgggtccgccaggctccaggcaaggggctggagtgggtggctaccatatcatatgatggaagtgataaaacctatccagactccgtgaagggccgattcaccatcttcagagacacttccaagaacacggtgtatctccaaatgaacagcctgagagctgaagacacggctatttattactgtgcgagatgtccgacggtgattgaccccctctttgactactggggccagggaaccctggtcaccatctcctcag

SEQ ID NO: 2010 - protein, 120 aa, Artificial Sequence
  Description of Artificial Sequence: Synthetic polypeptide
QVQLVESGGGVVQPGRSLRLSCAASGFSLSSHGMHWVRQAPGKGLEWVATISYDGSDKTYPDSVKGRFTIFRDTSKNTVYLQMNSLRAEDTAIYYCARCPTVIDPLFDYWGQGTLVTISS

SEQ ID NO: 2011 - protein, 13 aa, Artificial Sequence
  Description of Artificial Sequence: Synthetic peptide
ARCPTVIDPLFDY

SEQ ID NO: 2012 - DNA, 322 bp, Artificial Sequence
  Description of Artificial Sequence: Synthetic polynucleotide
gaaatagtgatgacgcagtctccagccaccctgtctgtgtctccaggggaaagagccaccctctcctgcagggccagtcagagtgttaccaccaacttggcctggtaccagcagaaacctggccaggctcccaggctcctcatctttggtgcatccaccagggccactggtatcccagccaggttcagtggcagtgggtctgggacagagttcactctctccatcagcagcctgcagtctgaagattttgcagtttattactgtcagcagtataataactggcctccgaggttcggccaagggaccaaggtggaaatcaaac

SEQ ID NO: 2013 - protein, 107 aa, Artificial Sequence
  Description of Artificial Sequence: Synthetic polypeptide
EIVMTQSPATLSVSPGERATLSCRASQSVTTNLAWYQQKPGQAPRLLIFGASTRATGIPARFSGSGSGTEFTLSISSLQSEDFAVYYCQQYNNWPPRFGQGTKVEIK

SEQ ID NO: 2014 - protein, 9 aa, Artificial Sequence
  Description of Artificial Sequence: Synthetic peptide
QQYNNWPPR

SEQ ID NO: 2015 - DNA, 358 bp, Artificial Sequence
  Description of Artificial Sequence: Synthetic polynucleotide
gaggtgcagctggtggagtctgggggaaccttggtacagcctggagggtccctgagactctcctgtagtgcctctggattcagcttcagtgattatgaaatcaactgggtccgccaggctccagggaaggggctggagtgggttggttacattagtgatggtgccactgccatatactacgcagactctctgaagggccgattcaccatctccagagacgacgccaagaactcagtgtatctgcaaatgggtagcctgacaaccgaggacacggctgtttactattgtgcgagggcatccaatcactacaattactttgactactggggccagggaaccctggtcaccgtctcctcag

SEQ ID NO: 2016 - protein, 119 aa, Artificial Sequence
  Description of Artificial Sequence: Synthetic polypeptide
EVQLVESGGTLVQPGGSLRLSCSASGFSFSDYEINWVRQAPGKGLEWVGYISDGATAIYYADSLKGRFTISRDDAKNSVYLQMGSLTTEDTAVYYCARASNHYNYFDYWGQGTLVTVSS

SEQ ID NO: 2017 - protein, 12 aa, Artificial Sequence
  Description of Artificial Sequence: Synthetic peptide
ARASNHYNYFDY

SEQ ID NO: 2018 - DNA, 325 bp, Artificial Sequence
  Description of Artificial Sequence: Synthetic polynucleotide
  modified_base (58)..(58): a, c, t, g, unknown or other
  modified_base (68)..(68): a, c, t, g, unknown or other
gacatccagatgacccagtctccttccaccctgtctgcatctgtaggagacagagtcnccatcacttnccgggccagtcagagtattagtaggtggttggcctggtatcagcagaaaccagggaaagcccctaagcttctaatctataaggcgtctagtttagaaagtggggtcccatcaaggttcagcggcagtggatctgggacagaattcactctcaccatcagcagcctgcagcctgatgattttgcaacttattactgccaacagtacaatactttttcggagaccacttttggcccggggaccaggctggagatcaaac

SEQ ID NO: 2019 - protein, 108 aa, Artificial Sequence
  Description of Artificial Sequence: Synthetic polypeptide
  MOD_RES (20)..(20): Any amino acid
  MOD_RES (23)..(23): Any amino acid
DIQMTQSPSTLSASVGDRVXITXRASQSISRWLAWYQQKPGKAPKLLIYKASSLESGVPSRFSGSGSGTEFTLTISSLQPDDFATYYCQQYNTFSETTFGPGTRLEIK

SEQ ID NO: 2020 - protein, 10 aa, Artificial Sequence
  Description of Artificial Sequence: Synthetic peptide
QQYNTFSETT

SEQ ID NO: 2021 - DNA, 358 bp, Artificial Sequence
  Description of Artificial Sequence: Synthetic polynucleotide
caggtgcagctggtggagtctgggggaggcgtggtccaacctgggaggtccctgacactctcctgtgcagcctctggattcaccttcagtacctacaatatggactgggtccgccaggctccaggcaagggcctggagtgggtggctattatcacagatgatggagaccataagtactatccagactccctgcagggccgattcaccatctccagagacaattccaagaacaccctttatctacaaatgcgtgacgtgagaggtgaggacacggctgtctactactgtgtgagagatcgtggatacagtaatggttttgactactggggccagggatccatggtcaccgtctcctcag

SEQ ID NO: 2022 - protein, 119 aa, Artificial Sequence
  Description of Artificial Sequence: Synthetic polypeptide
QVQLVESGGGVVQPGRSLTLSCAASGFTFSTYNMDWVRQAPGKGLEWVAIITDDGDHKYYPDSLQGRFTISRDNSKNTLYLQMRDVRGEDTAVYYCVRDRGYSNGFDYWGQGSMVTVSS

SEQ ID NO: 2023 - protein, 12 aa, Artificial Sequence
  Description of Artificial Sequence: Synthetic peptide
VRDRGYSNGFDY

SEQ ID NO: 2024 - DNA, 322 bp, Artificial Sequence
  Description of Artificial Sequence: Synthetic polynucleotide
gaaatagtgatgacgcagtctccagccaccctgtctgtgtctgcaggggaaagagcaaccctctcctgcagggccagtcagggtgttaccaccaatttggcctggtaccagcagaaacctggccagcctcccaggctcctcatctatggtgcatccaccagggccacttatatcccagccaggttcagtggcagtgggtctgggacagaattcactctcaccatcagcagcctgcggtctgaagattttgcagtttattactgtcagcagtataataactggcctctcactttcggcggagggaccaagctggagatcaaac

SEQ ID NO: 2025 - protein, 107 aa, Artificial Sequence
  Description of Artificial Sequence: Synthetic polypeptide
EIVMTQSPATLSVSAGERATLSCRASQGVTTNLAWYQQKPGQPPRLLIYGASTRATYIPARFSGSGSGTEFTLTISSLRSEDFAVYYCQQYNNWPLTFGGGTKLEIK

SEQ ID NO: 2026 - protein, 9 aa, Artificial Sequence
  Description of Artificial Sequence: Synthetic peptide
QQYNNWPLT

SEQ ID NO: 2027 - DNA, 361 bp, Artificial Sequence
  Description of Artificial Sequence: Synthetic polynucleotide
gaggtgcagctggtggagtctgggggaggcctggtcaagcctggggggtccctgagactctcctgtgaagcctctggattcaccttcagttattataacatgaactgggtccgccaggctccagggagggggctggagtgggtctcctctattagtgatagtagtagttatacatactacacagagtcactgaagggccgattcaccatctccagagacaacgccaagaactccctgtatctgcaaatgaacagcctaagggtcgaggacacggctgtttattactgtgcgagagatgtcgcggctcgttacgcttactttgacttgtggggccagggaaccctggtcaccgtctcctcag

SEQ ID NO: 2028 - protein, 120 aa, Artificial Sequence
  Description of Artificial Sequence: Synthetic polypeptide
EVQLVESGGGLVKPGGSLRLSCEASGFTFSYYNMNWVRQAPGRGLEWVSSISDSSSYTYYTESLKGRFTISRDNAKNSLYLQMNSLRVEDTAVYYCARDVAARYAYFDLWGQGTLVTVSS

SEQ ID NO: 2029 - protein, 13 aa, Artificial Sequence
  Description of Artificial Sequence: Synthetic peptide
ARDVAARYAYFDL

SEQ ID NO: 2030 - DNA, 325 bp, Artificial Sequence; identical to SEQ ID NO: 174
  Description of Artificial Sequence: Synthetic polynucleotide

SEQ ID NO: 2031 - protein, 108 aa, Artificial Sequence; identical to SEQ ID NO: 56
  Description of Artificial Sequence: Synthetic polypeptide

SEQ ID NO: 2032 - protein, 10 aa, Artificial Sequence
  Description of Artificial Sequence: Synthetic peptide
QQYNTFSALT

SEQ ID NO: 2033 - DNA, 370 bp, Artificial Sequence
  Description of Artificial Sequence: Synthetic polynucleotide
gaggtgcagctggtggagtctgggggaggtttggtccagcctggggggtccctgagactctcctgttcagcctctggattcagcttcagttcctatgctatgcactgggtccgccaggctccagggaagggactggaatatgtttcaactattaataataatggggaaatcacatactacgcagactccgtgaagggcagattcaccatctccagagacaattccaagaacactctgtatcttcaaatgaccagtctgagacctgaggacacggctgtgttttactgtgtaactgccgtcagcagtaggtatttctccccgtactactttgactcctggggccggggaaacctggtcaccgtctcctcag

SEQ ID NO: 2034 - protein, 123 aa, Artificial Sequence
  Description of Artificial Sequence: Synthetic polypeptide
EVQLVESGGGLVQPGGSLRLSCSASGFSFSSYAMHWVRQAPGKGLEYVSTINNNGEITYYADSVKGRFTISRDNSKNTLYLQMTSLRPEDTAVFYCVTAVSSRYFSPYYFDSWGRGNLVTVSS

SEQ ID NO: 2035 - protein, 16 aa, Artificial Sequence
  Description of Artificial Sequence: Synthetic peptide
VTAVSSRYFSPYYFDS

SEQ ID NO: 2036 - DNA, 343 bp, Artificial Sequence
  Description of Artificial Sequence: Synthetic polynucleotide
gacatcgtgatgacccagtctccagactccctggctgtgtctctgggcgagagggccaccatcaactgcaagtccagccagagtcttttatacagctccaacaataagaactacttagcttggtaccaacagaaaccaggtcaccctcctaagctgctcatttcctgggcatctacccggggatccggggtccctgaccgattcagtggcagcgggtctgggacagatttcactctcaccatcagcagcctgcaggctgaagatgtggcagtttattactgtcagcaatattatggtactcctctaatcactttcggcggagggaccaaggtggagatcaaac

SEQ ID NO: 2037 - protein, 114 aa, Artificial Sequence
  Description of Artificial Sequence: Synthetic polypeptide
DIVMTQSPDSLAVSLGERATINCKSSQSLLYSSNNKNYLAWYQQKPGHPPKLLISWASTRGSGVPDRFSGSGSGTDFTLTISSLQAEDVAVYYCQQYYGTPLITFGGGTKVEIK

SEQ ID NO: 2038 - protein, 10 aa, Artificial Sequence
  Description of Artificial Sequence: Synthetic peptide
QQYYGTPLIT

SEQ ID NO: 2039 - DNA, 367 bp, Artificial Sequence
  Description of Artificial Sequence: Synthetic polynucleotide
caggtgcagctggtggagtctgggggaggcgtggtccagcctgggaggtccctgagactctcctgtgcggcgtctggattcaccttcagtgactatgccatacactgggtccgccagtctccaggcagggggctggagtggatggctcttatatgggatgatggaagtgttaaacattatagagactccgtgaagggccgattcaccatctccagagacaattccaagaacacggtgtttctgcagatgaacagcctgagagccgaggacacggctgtgtactattgtgcgaaagatttagacagggggggaagcagctcgccttttgaccactggggccagggaaccctggtcaccgtctcctcag

SEQ ID NO: 2040 - protein, 122 aa, Artificial Sequence; identical to SEQ ID NO: 35
  Description of Artificial Sequence: Synthetic polypeptide

SEQ ID NO: 2041 - protein, 15 aa, Artificial Sequence
  Description of Artificial Sequence: Synthetic peptide
AKDLDRGGSSSPFDH

SEQ ID NO: 2042 - DNA, 322 bp, Artificial Sequence
  Description of Artificial Sequence: Synthetic polynucleotide
  modified_base (89)..(89): a, c, t, g, unknown or other
  modified_base (91)..(91): a, c, t, g, unknown or other
  modified_base (93)..(93): a, c, t, g, unknown or other
gaaattgtgttgacacagtctccagccaccctgtctttgtctccaggggaaagagccaccctctcctgcagggccagtcagagtgttantncntacttagcctggtaccaacagaaacctggccagcctcccagactcctcatctatgatgcatccaccagggccactggcatcccagccaggttcagtggcagtgggtctgggacagacttcactctcaccatcggtagcctcgagcctggagattttgcagtttattactgtcagcagcgtagcaactggcctctcactttcggcggagggaccaaggtggagatcaaac

SEQ ID NO: 2043 - protein, 107 aa, Artificial Sequence
  Description of Artificial Sequence: Synthetic polypeptide
  MOD_RES (30)..(31): Any amino acid
EIVLTQSPATLSLSPGERATLSCRASQSVXXYLAWYQQKPGQPPRLLIYDASTRATGIPARFSGSGSGTDFTLTIGSLEPGDFAVYYCQQRSNWPLTFGGGTKVEIK

SEQ ID NO: 2044 - protein, 9 aa, Artificial Sequence
  Description of Artificial Sequence: Synthetic peptide
QQRSNWPLT

SEQ ID NO: 2045 - DNA, 355 bp, Artificial Sequence
  Description of Artificial Sequence: Synthetic polynucleotide
caggtgcagctggtgcagtctggggctgaggtgaagaagcctgggtcctcggtgaaagtctcctgcaaggcttctggaggcaccttcagcaactttgctatcagctgggtgcgacaggcccctggacaagggcttgagtggatgggagacatcatccctttctttggtacagcaaactacgcacagaagttccagggcagagtcacgattagtgcggacgaatccacgaccacagcctccatggagctgagcagcctgacatctgaggacacggccgtgtattattgtgcgagagaagggggatatagtggctacgaaaactggggccagggaaccctggtcaccgtctcctcag

SEQ ID NO: 2046 - protein, 118 aa, Artificial Sequence
  Description of Artificial Sequence: Synthetic polypeptide
QVQLVQSGAEVKKPGSSVKVSCKASGGTFSNFAISWVRQAPGQGLEWMGDIIPFFGTANYAQKFQGRVTISADESTTTASMELSSLTSEDTAVYYCAREGGYSGYENWGQGTLVTVSS

SEQ ID NO: 2047 - protein, 11 aa, Artificial Sequence
  Description of Artificial Sequence: Synthetic peptide
AREGGYSGYEN

SEQ ID NO: 2048 - DNA, 337 bp, Artificial Sequence
  Description of Artificial Sequence: Synthetic polynucleotide
gatattgtgatgactcagtctccactctccctgcccgtcacccctggagagccggcctccatctcctgcaggtctagtcagagcctcctgcatcgtaatggatacaactatttggattggtacctgcagaagccagggcagtctccacagctcctgatccatttgggatctaatcgggcctccggggtccctgacaggttcagtggcagtggatcaggcacagattttacactgaaaatcagcagagtggaggctgaggatgttggggtttattactgcatgcaagctctacgagctccccggagttttgggcaggggaccaagctggagatcaaac

SEQ ID NO: 2049 - protein, 112 aa, Artificial Sequence
  Description of Artificial Sequence: Synthetic polypeptide
DIVMTQSPLSLPVTPGEPASISCRSSQSLLHRNGYNYLDWYLQKPGQSPQLLIHLGSNRASGVPDRFSGSGSGTDFTLKISRVEAEDVGVYYCMQALRAPRSFGQGTKLEIK

SEQ ID NO: 2050 - protein, 9 aa, Artificial Sequence
  Description of Artificial Sequence: Synthetic peptide
MQALRAPRS

SEQ ID NO: 2051 - DNA, 367 bp, Artificial Sequence; identical to SEQ ID NO: 2039
  Description of Artificial Sequence: Synthetic polynucleotide

SEQ ID NO: 2052 - protein, 122 aa, Artificial Sequence; identical to SEQ ID NO: 35
  Description of Artificial Sequence: Synthetic polypeptide

SEQ ID NO: 2053 - protein, 15 aa, Artificial Sequence
  Description of Artificial Sequence: Synthetic peptide
AKDLDRGGSSSPFDH

SEQ ID NO: 2054 - DNA, 322 bp, Artificial Sequence
  Description of Artificial Sequence: Synthetic polynucleotide
gaaattgtgttgacacagtctccagccaccctgtctttgtctccaggggaaagagccaccctctcctgcagggccagtcagaatgttaacacctacttagcctggtatcaacagaaacctggccgggctcccaggctcgtcatttatgaagcgtccaacagggccactggcatcccagccaggttcagtggcagtgggtcggggacagacttcaccctcaccatcagcagcctggaggctgaggattctgcagtttattactgtcagcagcgtaacacctggcctctctctttcggcggagggaccaaggtggagatcaaac

SEQ ID NO: 2055 - protein, 107 aa, Artificial Sequence; identical to SEQ ID NO: 36
  Description of Artificial Sequence: Synthetic polypeptide

SEQ ID NO: 2056 - protein, 9 aa, Artificial Sequence
  Description of Artificial Sequence: Synthetic peptide
QQRNTWPLS

SEQ ID NO: 2057 - DNA, 361 bp, Artificial Sequence
  Description of Artificial Sequence: Synthetic polynucleotide
caggtgcagctggtggagtctgggggaggcgtggtccagcctgggaggtccctgagactctcctgtgcagcctctggattcaccttcagtaactatggcatgcactgggtccgccaggctccaggcaagggactggactgggtggcagttatttcatatgatgcaattagtaagtcctatgcagactccgtggagggccgattcaccatctccagagacaattccaagaacacgctgtatctgcaaatgaacagcctgagagctgaggactcggctgtctattactgtgcgaaatcaccgacggcgatagatcccccctttgattactggggccagggaaccctggtcaccgtctcctcag

SEQ ID NO: 2058 - protein, 120 aa, Artificial Sequence; identical to SEQ ID NO: 19
  Description of Artificial Sequence: Synthetic polypeptide

SEQ ID NO: 2059 - protein, 13 aa, Artificial Sequence
  Description of Artificial Sequence: Synthetic peptide
AKSPTAIDPPFDY

SEQ ID NO: 2060 - DNA, 322 bp, Artificial Sequence
  Description of Artificial Sequence: Synthetic polynucleotide
gaaatagtgatgacgcagtctccagccaccctgtctgtgtctccaggggaaagagccaccctctcctgctgggccagtcagagtgttagcagcaacttggcctggtaccagcagaaacctggccaggctcccaggctcctcatctatggtgcatccaccagggccactggtatcccagccaggttcagtgccagtgggtctgggacagagttcactctcaccatcagcagcctgcagtctgaagattttgcagtttattactgtcagcagtataataactggcctccgaggttcggccaagggaccaaggtggaaatcaaac

SEQ ID NO: 2061 - protein, 107 aa, Artificial Sequence; identical to SEQ ID NO: 20
  Description of Artificial Sequence: Synthetic polypeptide

SEQ ID NO: 2062 - protein, 9 aa, Artificial Sequence
  Description of Artificial Sequence: Synthetic peptide
QQYNNWPPR

SEQ ID NO: 2063 - DNA, 355 bp, Artificial Sequence
  Description of Artificial Sequence: Synthetic polynucleotide
caggtgcagctggtgcagtctgggactgaggtgaagaagcctgggtcttcggtgaaggtctcctgcaagtcttctggaggcaccttcagcaactttgctatcaattgggtgcgacaggcccccggacaggggcttgagtggatgggagagatcatccctatctttggcacaccaaactacgcccagaagttccagggcaaagtcaccattaccgcggacgagtccacgcgcacatcttacatggagctgagcaacctgagatctgaggacacggccttgtattactgtgcgaggaccgatggctacggcagtttggacgactggggccagggaaccctggtcaccgtctcctcag

SEQ ID NO: 2064 - protein, 118 aa, Artificial Sequence
  Description of Artificial Sequence: Synthetic polypeptide
QVQLVQSGTEVKKPGSSVKVSCKSSGGTFSNFAINWVRQAPGQGLEWMGEIIPIFGTPNYAQKFQGKVTITADESTRTSYMELSNLRSEDTALYYCARTDGYGSLDDWGQGTLVTVSS

SEQ ID NO: 2065 - protein, 11 aa, Artificial Sequence
  Description of Artificial Sequence: Synthetic peptide
ARTDGYGSLDD

SEQ ID NO: 2066 - DNA, 337 bp, Artificial Sequence
  Description of Artificial Sequence: Synthetic polynucleotide
gatattgtgatgactcagtctccactctccctgcccgtcacccctggagagtcggcctccatctcctgcaggtctagtcagagcctcctgcatagtaatgggtacaactatttggattggtacctgcagaagccagggcagtctccacagctcctgatctatttgggttctaatcgggcctccggggtccctgacaggttcagtggcagtggatcaggcacagattttacactgaagattagcagagtggaggctgaggatgttggggtttattactgcatgcaagctcgacaaactcctcgcactttcggcggagggaccaaggtggagatcaaac

SEQ ID NO: 2067 - protein, 112 aa, Artificial Sequence
  Description of Artificial Sequence: Synthetic polypeptide
DIVMTQSPLSLPVTPGESASISCRSSQSLLHSNGYNYLDWYLQKPGQSPQLLIYLGSNRASGVPDRFSGSGSGTDFTLKISRVEAEDVGVYYCMQARQTPRTFGGGTKVEIK

SEQ ID NO: 2068 - protein, 9 aa, Artificial Sequence
  Description of Artificial Sequence: Synthetic peptide
MQARQTPRT

SEQ ID NO: 2069 - DNA, 364 bp, Artificial Sequence
  Description of Artificial Sequence: Synthetic polynucleotide
caggtgcagctggtggagtctgggggaggcgtggtccagcctgggaggtccctgagactctcctgtgccgcctctggattcaccttcagtagctttggcatgcactgggtccgccagactccaggcaagggactggagtgggtggcagttatatcatatgatggagctcagaaatactatgttgactctgtggagggccgattcaccatctccagagacaattccaagaacacggtgtatctacaaatgaacagcctgagacctgaggacacggctgtgtatttctgtgcgaaagcaattagcacgggatggttcgggttctttcactactggggccagggaaacctggtcaccgtctcctcag

SEQ ID NO: 2070 - protein, 121 aa, Artificial Sequence
  Description of Artificial Sequence: Synthetic polypeptide
QVQLVESGGGVVQPGRSLRLSCAASGFTFSSFGMHWVRQTPGKGLEWVAVISYDGAQKYYVDSVEGRFTISRDNSKNTVYLQMNSLRPEDTAVYFCAKAISTGWFGFFHYWGQGNLVTVSS

SEQ ID NO: 2071 - protein, 14 aa, Artificial Sequence
  Description of Artificial Sequence: Synthetic peptide
AKAISTGWFGFFHY

SEQ ID NO: 2072 - DNA, 325 bp, Artificial Sequence
  Description of Artificial Sequence: Synthetic polynucleotide
gaaattgtgttgacgcagtctccaggcaccctgtctttgtctccaggggaaagagcgaccctctcctgcagggccagtcagagtgttaccagccgctacttagcctggtaccaacagaaacctggccaggctcccaggctcctcatctatgctgcatccagcaggaccactgacatcccagacaggttcagtggcagtgggtctgggacagacttcactctcaccatcagcagactggagcctgaagattttgcagtgtattactgtcagcagtatggtagttcacctcagacgttcggccaagggaccaaggtggaaatcaaac

SEQ ID NO: 2073 - protein, 108 aa, Artificial Sequence
  Description of Artificial Sequence: Synthetic polypeptide
EIVLTQSPGTLSLSPGERATLSCRASQSVTSRYLAWYQQKPGQAPRLLIYAASSRTTDIPDRFSGSGSGTDFTLTISRLEPEDFAVYYCQQYGSSPQTFGQGTKVEIK

SEQ ID NO: 2074 - protein, 9 aa, Artificial Sequence
  Description of Artificial Sequence: Synthetic peptide
QQYGSSPQT

SEQ ID NO: 2075 - DNA, 358 bp, Artificial Sequence
  Description of Artificial Sequence: Synthetic polynucleotide
gaggtgcagctggtggagtctgggagcaaattggttcagcctggagggtccctaagactctcctgtgcagcctctggattcagcttccctgattatgaaatgaactgggtccgccaggctcccgggaaggggctggagtggattgcatacattagtagtggtggcaatgacatatactacgcagactctgtcaagggccgattcaccatctccagaaacgacaccaacaactccctatttctgcaaatgaacagccttagagccgaggacacggctttttattactgtgcgagaggtacagatcactacaatttttttcgccactggggccagggaaccctggtcaccgtctcctcag

SEQ ID NO: 2076 - protein, 119 aa, Artificial Sequence
  Description of Artificial Sequence: Synthetic polypeptide
EVQLVESGSKLVQPGGSLRLSCAASGFSFPDYEMNWVRQAPGKGLEWIAYISSGGNDIYYADSVKGRFTISRNDTNNSLFLQMNSLRAEDTAFYYCARGTDHYNFFRHWGQGTLVTVSS

SEQ ID NO: 2077 - protein, 12 aa, Artificial Sequence
  Description of Artificial Sequence: Synthetic peptide
ARGTDHYNFFRH

SEQ ID NO: 2078 - DNA, 322 bp, Artificial Sequence
  Description of Artificial Sequence: Synthetic polynucleotide
gacatccagatgacccagtctccttccaccctgtctgcatctataggagacagagtcaccatcacttgccgggccagtcagggtattaataggtggttggcctggtatcagcagaaaccagggaaagcccctaaactcctgatctataaggcgtctactttagaaagtggggtcccatcaagattcagtggcagtggatctgggacagaattcactctcaccatcagcagcctgcagcctgaggattttgcaacttatttctgccaacagtatttttccttttcccggctcactttcggcggagggaccaaggtggagatca

SEQ ID NO: 2079 - protein, 107 aa, Artificial Sequence
  Description of Artificial Sequence: Synthetic polypeptide
DIQMTQSPSTLSASIGDRVTITCRASQGINRWLAWYQQKPGKAPKLLIYKASTLESGVPSRFSGSGSGTEFTLTISSLQPEDFATYFCQQYFSFSRLTFGGGTKVEI

SEQ ID NO: 2080 - protein, 10 aa, Artificial Sequence
  Description of Artificial Sequence: Synthetic peptide
QQYFSFSRLT

SEQ ID NO: 2081 - DNA, 369 bp, Artificial Sequence
  Description of Artificial Sequence: Synthetic polynucleotide
caggtgcagctggtgcagtctggggctgaggtgaagaagcctggggcctcagtgaaggtctcctgcaaggcctctggatataccttcaccgcctactatattcactgggtgcgacaggcccctggacaagggcctgagtggatgggatggatcaaccccaacagtggtggcacaaactatatacagaagtttaagggcagggtcaccgtgaccagggacacgtccatcaacacagcctacatggaactgactaggctgagatctgacgacacggccgtttattactgtgcgagagatgtttcggggagtttctccttttattacggtttggacgtctggggccaagggaccacggtcaccgtctcctca

SEQ ID NO: 2082 - protein, 123 aa, Artificial Sequence
  Description of Artificial Sequence: Synthetic polypeptide
QVQLVQSGAEVKKPGASVKVSCKASGYTFTAYYIHWVRQAPGQGPEWMGWINPNSGGTNYIQKFKGRVTVTRDTSINTAYMELTRLRSDDTAVYYCARDVSGSFSFYYGLDVWGQGTTVTVSS

SEQ ID NO: 2083 - protein, 16 aa, Artificial Sequence
  Description of Artificial Sequence: Synthetic peptide
ARDVSGSFSFYYGLDV

SEQ ID NO: 2084 - DNA, 322 bp, Artificial Sequence
  Description of Artificial Sequence: Synthetic polynucleotide
gacatccagttgacccagtctccatccttcctgtctgcatctgtaggagacagagtcaccatcacttgccgggccagtcacgacattaccagttttttagcctggtatcagcacaaaccagggaaagcccctaagctcctgatctatgttgcatccactttgcaaagtggggtcccatcaaggttcagcggcagtggatatgggacagaattcactctcacaatcagcagcctgcagcctgaagattttgcaacttattactgtcaacagcttaatagttaccctttccttttcggcggagggaccaaggtggagatcaaac

SEQ ID NO: 2085 - protein, 107 aa, Artificial Sequence
  Description of Artificial Sequence: Synthetic polypeptide
DIQLTQSPSFLSASVGDRVTITCRASHDITSFLAWYQHKPGKAPKLLIYVASTLQSGVPSRFSGSGYGTEFTLTISSLQPEDFATYYCQQLNSYPFLFGGGTKVEIK

SEQ ID NO: 2086 - protein, 9 aa, Artificial Sequence
  Description of Artificial Sequence: Synthetic peptide
QQLNSYPFL

SEQ ID NO: 2087 - DNA, 355 bp, Artificial Sequence
  Description of Artificial Sequence: Synthetic polynucleotide
caggtgcagctggtgcagtctgggtctgaggtgaagaagcctgggtccgcggtgaaggtctcctgcaagacctctggaggcaccttcagccactttgcaatcaactgggtgcgacaggcccctggacaaggccttgagtggatgggagggatcatcccaatctttggaacagcaaactacgcacagaagttccaggacagagtcacgattaccgcggacgaatccacgagcacagcctacatggagctgagtagtctgagatctgaggacacggccgtgtattactgtgcgagagttggcggctacggtgactacgaccactggggccagggaaccctggtcatcgtctcctcag

SEQ ID NO: 2088 - protein, 118 aa, Artificial Sequence
  Description of Artificial Sequence: Synthetic polypeptide
QVQLVQSGSEVKKPGSAVKVSCKTSGGTFSHFAINWVRQAPGQGLEWMGGIIPIFGTANYAQKFQDRVTITADESTSTAYMELSSLRSEDTAVYYCARVGGYGDYDHWGQGTLVIVSS

SEQ ID NO: 2089 - protein, 11 aa, Artificial Sequence
  Description of Artificial Sequence: Synthetic peptide
ARVGGYGDYDH

SEQ ID NO: 2090 - DNA, 337 bp, Artificial Sequence
  Description of Artificial Sequence: Synthetic polynucleotide
  modified_base (38)..(38): a, c, t, g, unknown or other
  modified_base (40)..(40): a, c, t, g, unknown or other
gatattgtgatgactcagtctccactctccctgcccgncncccctggagagccggcctccatctcctgcaggtctagtcagagcctcctgaataggaacggatacacctatttggattggttcctgcagaagccagggcagtctccacaactcctgatctttttgggttctaatcgggcctccggggtccctgacaggttcagtggcagtggatcaggcacagattttacactgaaaatcagcagagtggaggctgaggatgttggggtttattactgcatgcaagctctacaaactcctcagacttttggccaggggaccaagctggagatcaaac

SEQ ID NO: 2091 - protein, 112 aa, Artificial Sequence
  Description of Artificial Sequence: Synthetic polypeptide
  MOD_RES (13)..(14): Any amino acid
DIVMTQSPLSLPXXPGEPASISCRSSQSLLNRNGYTYLDWFLQKPGQSPQLLIFLGSNRASGVPDRFSGSGSGTDFTLKISRVEAEDVGVYYCMQALQTPQTFGQGTKLEIK

SEQ ID NO: 2092 - protein, 9 aa, Artificial Sequence
  Description of Artificial Sequence: Synthetic peptide
MQALQTPQT

SEQ ID NO: 2093 - DNA, 361 bp, Artificial Sequence
  Description of Artificial Sequence: Synthetic polynucleotide
gaggtgcagctggtggagtctgggggaggcttggtacagcctggggggtccctgagactctcctgtgcagcctctggattcaccttcagtagctatagcatgaactgggtccgccaggctccagggaaggggctggagtgggtttcatacattagtagtagtagtagtaccatatactacgcagactctgtgaagggccgattcaccatctccagagacgatgccaagaactcactgtatctgcaaatgaacagcctgagagacgcggacacggctgtctattactgtgcgacagagagttcggggagttattcctactttgactcctggggccagggaaccctggtcaccgtctcctcag

SEQ ID NO: 2094 - protein, 120 aa, Artificial Sequence
  Description of Artificial Sequence: Synthetic polypeptide
EVQLVESGGGLVQPGGSLRLSCAASGFTFSSYSMNWVRQAPGKGLEWVSYISSSSSTIYYADSVKGRFTISRDDAKNSLYLQMNSLRDADTAVYYCATESSGSYSYFDSWGQGTLVTVSS

SEQ ID NO: 2095 - protein, 13 aa, Artificial Sequence
  Description of Artificial Sequence: Synthetic peptide
ATESSGSYSYFDS

SEQ ID NO: 2096 - DNA, 325 bp, Artificial Sequence
  Description of Artificial Sequence: Synthetic polynucleotide
gacatccagatgacccagtctccttccaccctgtctgcatctgtaggagacagagtcaccatcacttgccgggccagtcagagtatcagtaggtggttggcctggtatcagcagaaaccagggaaagcccctaagctcctgatctataaggcgtctagtttagaaaggggggtcccatcaaggttcagcggcagaggatctgggacagaattcactctcaccatcagcagcctgcagcctgatgattttgcaacttattactgccaacagtataatactttttccgcgctcactttcggcggagggaccaaggtggagatcaaac

SEQ ID NO: 2097 - protein, 108 aa, Artificial Sequence
  Description of Artificial Sequence: Synthetic polypeptide
DIQMTQSPSTLSASVGDRVTITCRASQSISRWLAWYQQKPGKAPKLLIYKASSLERGVPSRFSGRGSGTEFTLTISSLQPDDFATYYCQQYNTFSALTFGGGTKVEIK

SEQ ID NO: 2098 - protein, 10 aa, Artificial Sequence
  Description of Artificial Sequence: Synthetic peptide
QQYNTFSALT

SEQ ID NO: 2099 - DNA, 358 bp, Artificial Sequence
  Description of Artificial Sequence: Synthetic polynucleotide
caggtgcagctggtgcagtctggggctgaggtgaaggagcctgggtcctcggtgaaggtctcctgcaaggcttctggaggcaccttcagcaactatgatatcagctgggtgcgacaggcccctggacaagggcttgagtacatgggagggatcatccctatctttggtacagcaaactacgcacagaagttccagggcagagtcacgattaccgcggacgaatccacgagcacagcctacatggagctgagcagcctgagatctgaggactcggccgtgtattactgtgcgagagattcgggtgggacagctagctttgactactggggccagggaaccctggtcaccgtctcctcag

SEQ ID NO: 2100 - protein, 119 aa, Artificial Sequence
  Description of Artificial Sequence: Synthetic polypeptide
QVQLVQSGAEVKEPGSSVKVSCKASGGTFSNYDISWVRQAPGQGLEYMGGIIPIFGTANYAQKFQGRVTITADESTSTAYMELSSLRSEDSAVYYCARDSGGTASFDYWGQGTLVTVSS

SEQ ID NO: 2101 - protein, 12 aa, Artificial Sequence
  Description of Artificial Sequence: Synthetic peptide
ARDSGGTASFDY

SEQ ID NO: 2102 - DNA, 337 bp, Artificial Sequence
  Description of Artificial Sequence: Synthetic polynucleotide
gatattgtgatgactcagtctccactctccctgcccgtcacccctggagagccggcctccatctcctgcaggtctagtcagagcctcctgcatagaaatggatacaactatttggattggtacctgcagaagccagggcagtctccacagctcctgatctatttgggttctaatcgggcctccggggtccctgacaggttcagtggcagtggatcaggcacagattttacactgaaaatcagcagagtggaggctgaggatgttggggtttattactgcatgcaagctctacaaactccgtggacgttcggccaagggaccaaggtggaaatcaaac

SEQ ID NO: 2103 - protein, 112 aa, Artificial Sequence
  Description of Artificial Sequence: Synthetic polypeptide
DIVMTQSPLSLPVTPGEPASISCRSSQSLLHRNGYNYLDWYLQKPGQSPQLLIYLGSNRASGVPDRFSGSGSGTDFTLKISRVEAEDVGVYYCMQALQTPWTFGQGTKVEIK

SEQ ID NO: 2104 - protein, 9 aa, Artificial Sequence
  Description of Artificial Sequence: Synthetic peptide
MQALQTPWT

SEQ ID NO: 2105 - DNA, 355 bp, Artificial Sequence
  Description of Artificial Sequence: Synthetic polynucleotide
caggtgcagctggtgcagtctggggctgaggtgaagaagcctgggtcctcggtgaaggtctcctgcaagtcctctggaggcaccttcagtaattttgatatcagctgggtgcgacaggcccctggacaagggctggagtggatgggagggatcatccccgtctttggaacagcaacgtacgcaccgaagttccacggcagagtcacgattacggcggactcatccacgagcacagtgtacatggaagtgcccagcctgagatctgaggacacggccgtctattattgtgcgagatttggtggatatagtggctatgaggaatggggccagggaaccctggtcgccgtctcctcag

SEQ ID NO: 2106 - protein, 118 aa, Artificial Sequence
  Description of Artificial Sequence: Synthetic polypeptide
QVQLVQSGAEVKKPGSSVKVSCKSSGGTFSNFDISWVRQAPGQGLEWMGGIIPVFGTATYAPKFHGRVTITADSSTSTVYMEVPSLRSEDTAVYYCARFGGYSGYEEWGQGTLVAVSS

SEQ ID NO: 2107 - protein, 11 aa, Artificial Sequence
  Description of Artificial Sequence: Synthetic peptide
ARFGGYSGYEE

SEQ ID NO: 2108 - DNA, 335 bp, Artificial Sequence
  Description of Artificial Sequence: Synthetic polynucleotide
  modified_base (154)..(154): a, c, t, g, unknown or other
gatattgtgatgactcagtctccactctccctggccgtcacccccggagagccggcctccatctcctgcaggtctagtcagagcctcctgcatagaaatggatacaactatttcgattggtacctgcagaggccagggcagtctccacagctcntgatctatttgggttctaatcgggcctccggggtccctgacaggttcagtggcagtggatcaggcacagattttacactgaaaatcagcagagtggaggctgaggatgttggggtttactactgcatgcaaggtctacaaactcctcggacttttggccaggggaccaagctggagatcaa

SEQ ID NO: 2109 - protein, 111 aa, Artificial Sequence
  Description of Artificial Sequence: Synthetic polypeptide
  MOD_RES (52)..(52): Any amino acid
DIVMTQSPLSLAVTPGEPASISCRSSQSLLHRNGYNYFDWYLQRPGQSPQLXIYLGSNRASGVPDRFSGSGSGTDFTLKISRVEAEDVGVYYCMQGLQTPRTFGQGTKLEI

SEQ ID NO: 2110 - protein, 9 aa, Artificial Sequence
  Description of Artificial Sequence: Synthetic peptide
MQGLQTPRT

SEQ ID NO: 2111 - DNA, 361 bp, Artificial Sequence
  Description of Artificial Sequence: Synthetic polynucleotide
gaggtgcagctggtggagtctgggggaggcctggtcaagcctggggggtccctgagactctcctgtgcagcctctggactcaccttcactgcctatagaatgaattgggtccgccaggctccagggaaggggctggagtggctctcatcaattagtaatacaaatggcgacatatactatgcagactcagtgaagggccgattcaccatctccagagacaacgccaagaattctctgtatctgcaaatgaacagcctgagggccgacgacacggctgtatattactgtgcgagagatgttgcatctaactacgcttactttgacctttggggccagggaaccctggtcaccgtctcctcag

SEQ ID NO: 2112 - protein, 120 aa, Artificial Sequence
  Description of Artificial Sequence: Synthetic polypeptide
EVQLVESGGGLVKPGGSLRLSCAASGLTFTAYRMNWVRQAPGKGLEWLSSISNTNGDIYYADSVKGRFTISRDNAKNSLYLQMNSLRADDTAVYYCARDVASNYAYFDLWGQGTLVTVSS

SEQ ID NO: 2113 - protein, 13 aa, Artificial Sequence
  Description of Artificial Sequence: Synthetic peptide
ARDVASNYAYFDL

SEQ ID NO: 2114 - DNA, 325 bp, Artificial Sequence
  Description of Artificial Sequence: Synthetic polynucleotide
gacatccagatgacccagtctccttccaccctgtctgcatctgtaggagacagagtcaccatcacttgccgggccagtcagagtattagtacctggttggcctggtatcagcagaaaccagggaaagcccctaaactcctgatctataaggcgtctaatttacaaagtggggtcccgtcaaggttcagcggccgtggatctgggacagcgttcactctcaccatcagcagcctgcagcctgatgattttggaacttattactgccagcaatataatacttattctgcggtcactttcggcggagggaccaaggtggagatcaaac

SEQ ID NO: 2115 - protein, 108 aa, Artificial Sequence; identical to SEQ ID NO: 58
  Description of Artificial Sequence: Synthetic polypeptide

SEQ ID NO: 2116 - protein, 10 aa, Artificial Sequence
  Description of Artificial Sequence: Synthetic peptide
QQYNTYSAVT

SEQ ID NO: 2117 - DNA, 358 bp, Artificial Sequence
  Description of Artificial Sequence: Synthetic polynucleotide
gaggtgcagctggtggagtctgggggaggcttggtacagcctggggggtccctgagactctcctgtgcagcctctggattcaccttcagaagttacgccatgaactgggtccgccaggctccagggaaggggctggaatggatttcatacattagtactggtagtagtgacatatattacgcagactctgtgaagggccgattcaccatctccagagacgatgccaagaactcactgtatctgcaagtgaacagcctgagagacgaggacacggctgtgtattactgtgcgagagcctcgtggtcctataattactttgactactggggccagggaaccctggtcaccgtctcctcag

SEQ ID NO: 2118 - protein, 119 aa, Artificial Sequence
  Description of Artificial Sequence: Synthetic polypeptide
EVQLVESGGGLVQPGGSLRLSCAASGFTFRSYAMNWVRQAPGKGLEWISYISTGSSDIYYADSVKGRFTISRDDAKNSLYLQVNSLRDEDTAVYYCARASWSYNYFDYWGQGTLVTVSS

SEQ ID NO: 2119 - protein, 12 aa, Artificial Sequence
  Description of Artificial Sequence: Synthetic peptide
ARASWSYNYFDY

SEQ ID NO: 2120 - DNA, 325 bp, Artificial Sequence
  Description of Artificial Sequence: Synthetic polynucleotide
gacatccagatgacccagtctccttccaccctgtctgcatctgtaggagacagagtcaccttcacttgccgggccagtcagaatattcttaggtggttggcctggtatcagcagaaaccagggaaagcccctaagctcctgatctataaggcgtctaatttagagagtggggtcccatcaaggttcagcggcagtggatctgggacagagttcactctcaccatcagcagcctacagcctgatgattttgcaacttattactgccaacagtataatactttttctgaggtcactttcggcggagggaccaaggtggagatcaaac

SEQ ID NO: 2121 - protein, 108 aa, Artificial Sequence
  Description of Artificial Sequence: Synthetic polypeptide
DIQMTQSPSTLSASVGDRVTFTCRASQNILRWLAWYQQKPGKAPKLLIYKASNLESGVPSRFSGSGSGTEFTLTISSLQPDDFATYYCQQYNTFSEVTFGGGTKVEIK

SEQ ID NO: 2122 - protein, 10 aa, Artificial Sequence
  Description of Artificial Sequence: Synthetic peptide
QQYNTFSEVT

SEQ ID NO: 2123 - DNA, 358 bp, Artificial Sequence
  Description of Artificial Sequence: Synthetic polynucleotide
caggtgcagctggtggagtctgggggaggcgtggtccgacctgggaggtccctgagactctcctgtgcagcctctggattcaccttcaaccactttggcatgcactgggtccgccaggctccgggcaaggggctggagtgggtggcagttatttcatatgatggaagtactcaatactatgcagactccgtgaagggccgattcaccatctccagagacaattccaagaacacgctgtatctgcaaatgaacagcctgagacttgaggacacggctgtttattactgtgcgaaagaaggggggggtactggggctaatgactactggggccagggaagcctggtcaccgtctcctcag

SEQ ID NO: 2124 - protein, 119 aa, Artificial Sequence
  Description of Artificial Sequence: Synthetic polypeptide
QVQLVESGGGVVRPGRSLRLSCAASGFTFNHFGMHWVRQAPGKGLEWVAVISYDGSTQYYADSVKGRFTISRDNSKNTLYLQMNSLRLEDTAVYYCAKEGGGTGANDYWGQGSLVTVSS

SEQ ID NO: 2125 - protein, 12 aa, Artificial Sequence
  Description of Artificial Sequence: Synthetic peptide
AKEGGGTGANDY

SEQ ID NO: 2126 - DNA, 322 bp, Artificial Sequence
  Description of Artificial Sequence: Synthetic polynucleotide
gacatccagatgacccagtctccttccaccctgtctgcatctgtcggagacagagtcaccatcacttgccgggccagtcagagtcttagtacttggttggcctggtatcagcagaaaccagggaaagcccctaggctcctgatctatttggcgtctggtttagaaagtggggtcccatcaaggttcagcggcagtggatctgggacagaattcactctcaccatcagcagcctgcagcctgatgattttgcaacttattactgccaacagtataatcgttacccgtggacgttcggccaagggaccaaggtggaaatcaaac

SEQ ID NO: 2127 - protein, 107 aa, Artificial Sequence; identical to SEQ ID NO: 48
  Description of Artificial Sequence: Synthetic polypeptide

SEQ ID NO: 2128 - protein, 9 aa, Artificial Sequence
  Description of Artificial Sequence: Synthetic peptide
QQYNRYPWT

SEQ ID NO: 2129 - DNA, 376 bp, Artificial Sequence
  Description of Artificial Sequence: Synthetic polynucleotide
caggtgcagctggtgcagtctggggctgaggtgaagaagcctgggtcctcggtgagggtcgcctgcaaggcttcgggaggcaccttcagaagcaatgctgtcaactgggtgcgacaggcccctggacaagggtttgagtggatgggaggcatcatccctgtatctggaacaccaacctacgcacagaagttccaggggagggtcacgataaaggcggacgaatccacgagcacagtctacatggagatgagcagcctaagatctgaggacacggccatatattattgtgcgagaggcatccagaggtgggctagtggctacgaattcgtaactcttgactactggggccagggaaccctggtcaccgtctcctcag

SEQ ID NO: 2130 - protein, 125 aa, Artificial Sequence
  Description of Artificial Sequence: Synthetic polypeptide
QVQLVQSGAEVKKPGSSVRVACKASGGTFRSNAVNWVRQAPGQGFEWMGGIIPVSGTPTYAQKFQGRVTIKADESTSTVYMEMSSLRSEDTAIYYCARGIQRWASGYEFVTLDYWGQGTLVTVSS

SEQ ID NO: 2131 - protein, 18 aa, Artificial Sequence
  Description of Artificial Sequence: Synthetic peptide
ARGIQRWASGYEFVTLDY

SEQ ID NO: 2132 - DNA, 322 bp, Artificial Sequence
  Description of Artificial Sequence: Synthetic polynucleotide
gacatccagatgacccagtctccatcctccctgtctgcctctgtaggagacagagtcaccatcacttgccaagcgagtcagtacattagcatctatttaaattggtatcaacagaaggcagggaaagcccctaaactgctgatattcgatgcatccaatttgcaagcaggggtcccatcaaggttcagtggaagtgcatctgggacagagtttaccttgaccatcggcagcctgcagcctgaagatatcgcaacatattactgtcaacagtatgataatctcccgctcactttcggcggagggaccaaggtggagatcaaac

SEQ ID NO: 2133 - protein, 107 aa, Artificial Sequence
  Description of Artificial Sequence: Synthetic polypeptide
DIQMTQSPSSLSASVGDRVTITCQASQYISIYLNWYQQKAGKAPKLLIFDASNLQAGVPSRFSGSASGTEFTLTIGSLQPEDIATYYCQQYDNLPLTFGGGTKVEIK

SEQ ID NO: 2134 - protein, 9 aa, Artificial Sequence
  Description of Artificial Sequence: Synthetic peptide
QQYDNLPLT

SEQ ID NO: 2135 - DNA, 355 bp, Artificial Sequence
  Description of Artificial Sequence: Synthetic polynucleotide
caggtgcagctggtgcagtctggggccgaggtgaagaagcctgggtcctcggtgaaggtctcctgtaaggcttctggaggcaccttcagcaacttcgctatacactgggtgcgacaggcccctggacagggccttgagtggatgggaagcctcatccctttctttgggacagcaaaatacgcacaaaagtttcagggcagagtcacgattaccgcggacgaatccacgagcacagcctacatggacttgcgcagcctgacatctgcggacacggccgtgtatttctgtgcgagacaagatggctatggttctctcgacgactggggccagggaaccctgctcagcgtctcctcag

SEQ ID NO: 2136 - protein, 118 aa, Artificial Sequence
  Description of Artificial Sequence: Synthetic polypeptide
QVQLVQSGAEVKKPGSSVKVSCKASGGTFSNFAIHWVRQAPGQGLEWMGSLIPFFGTAKYAQKFQGRVTITADESTSTAYMDLRSLTSADTAVYFCARQDGYGSLDDWGQGTLLSVSS

SEQ ID NO: 2137 - protein, 11 aa, Artificial Sequence
  Description of Artificial Sequence: Synthetic peptide
ARQDGYGSLDD

SEQ ID NO: 2138 - DNA, 337 bp, Artificial Sequence
  Description of Artificial Sequence: Synthetic polynucleotide
gatattgtgatgactcagtctccactctccctgcccgtcacccctggagagccggcctccatctcctgcaggtctagtcagagcctcctgcatagtagtggatacaactatttggattggtacctgcagaagccagggcagtctccacagctcctgatctatttgggttctaatcgggcctccggggtccctgacaggttcagtggcagtggatcaggcacagattttacactgaaaatcagtagagtggaggctgaggatgttgggatttattactgcatgcaaactctacagactccgttgacgttcggccaagggaccaaggtggaaatcaaac

SEQ ID NO: 2139 - protein, 112 aa, Artificial Sequence
  Description of Artificial Sequence: Synthetic polypeptide
DIVMTQSPLSLPVTPGEPASISCRSSQSLLHSSGYNYLDWYLQKPGQSPQLLIYLGSNRASGVPDRFSGSGSGTDFTLKISRVEAEDVGIYYCMQTLQTPLTFGQGTKVEIK

SEQ ID NO: 2140 - protein, 9 aa, Artificial Sequence
  Description of Artificial Sequence: Synthetic peptide
MQTLQTPLT

SEQ ID NO: 2141 - DNA, 368 bp, Artificial Sequence
  Description of Artificial Sequence: Synthetic polynucleotide
gaggtgcagctgttggagtctgggggaggcttggttcagccgggggggtccctgagactctcctgtgcagcctctggattcacctttaccaactttgccatgagttgggtccgccaggctcctgggaaggggctggagtgggtctcaactatcagtggcagtggtgctgagacatactcagcagactccgtgaagggccggttcaccatctccagagacaattccaagaacacactatatctgcagatgaacaggctgagagccgacgacacggccgtttattactgtgcgaaagacagtggctactggagcagcatatataactgtttcgacccctggggccagggaaccctggtcaccgtctcctc

SEQ ID NO: 2142 - protein, 122 aa, Artificial Sequence
  Description of Artificial Sequence: Synthetic polypeptide
EVQLLESGGGLVQPGGSLRLSCAASGFTFTNFAMSWVRQAPGKGLEWVSTISGSGAETYSADSVKGRFTISRDNSKNTLYLQMNRLRADDTAVYYCAKDSGYWSSIYNCFDPWGQGTLVTVS

SEQ ID NO: 2143 - protein, 16 aa, Artificial Sequence
  Description of Artificial Sequence: Synthetic peptide
AKDSGYWSSIYNCFDP

SEQ ID NO: 2144 - DNA, 331 bp, Artificial Sequence
  Description of Artificial Sequence: Synthetic polynucleotide
gaaatagtgatgacgcagtctccagccaccctgtctgtgtctccaggggaaagagtcaccctctcctgcagggccagtcagagtatcaacagctacttggcctggtaccagcagaaacctggccaggctcccaggctcctcatccaagatgcatctgtcagggccactggtatcccagccaggttcagtggcagtgggtctgggacagagttcactctcaccatcagcagcctgcagtctgaagattttgcagtttattactgtcagcagtacaataactggcctccggggaggtacacctttggccaggggaccaagctgcagatcaaac

SEQ ID NO: 2145 - protein, 110 aa, Artificial Sequence
  Description of Artificial Sequence: Synthetic polypeptide
EIVMTQSPATLSVSPGERVTLSCRASQSINSYLAWYQQKPGQAPRLLIQDASVRATGIPARFSGSGSGTEFTLTISSLQSEDFAVYYCQQYNNWPPGRYTFGQGTKLQIK

SEQ ID NO: 2146 - protein, 12 aa, Artificial Sequence
  Description of Artificial Sequence: Synthetic peptide
QQYNNWPPGRYT

SEQ ID NO: 2147 - DNA, 358 bp, Artificial Sequence
  Description of Artificial Sequence: Synthetic polynucleotide
gaggtgcagctggtggagtctgggggaggcttggttcagcctggagggtccctgagactctcctgtgttgcctctggattcactttcggtccttatgaaatgaactgggtccgccaggctccagggaagggcctggagtggatttcatacattagtagtggtagtactgacatatactacgcagactctgtggagggccgattcaccatctccagagacgacgccaagcagtcactgtatttacaaatgaacagcctgagagccgaggacacggctgtttattattgtgtgagaccgaaggatcactacaacttttttgactactggggccagggaaccctggtcaccgtctcctcag

SEQ ID NO: 2148 - protein, 119 aa, Artificial Sequence
  Description of Artificial Sequence: Synthetic polypeptide
EVQLVESGGGLVQPGGSLRLSCVASGFTFGPYEMNWVRQAPGKGLEWISYISSGSTDIYYADSVEGRFTISRDDAKQSLYLQMNSLRAEDTAVYYCVRPKDHYNFFDYWGQGTLVTVSS

SEQ ID NO: 2149 - protein, 12 aa, Artificial Sequence
  Description of Artificial Sequence: Synthetic peptide
VRPKDHYNFFDY

SEQ ID NO: 2150 - DNA, 325 bp, Artificial Sequence
  Description of Artificial Sequence: Synthetic polynucleotide
gacatccagatgacccagtctccttccaccctgtctgcatctgtaggagacagagtcaccatcacttgccgggccagtcagactattaataggtggttggcctggtaccagcagagaccagggaaagcccctaaactgctgatctataaggcttctagtttacaaactggggtcccgtcaaggttcagcggaagtggatctgggacagaattcactctcaccatcagcagcctgcagcctgacgatattgcaacttattactgccagcagtataatactttttctcggctcactttcggcggagggaccaagctggagatcaaac

SEQ ID NO: 2151 - protein, 108 aa, Artificial Sequence
  Description of Artificial Sequence: Synthetic polypeptide
DIQMTQSPSTLSASVGDRVTITCRASQTINRWLAWYQQRPGKAPKLLIYKASSLQTGVPSRFSGSGSGTEFTLTISSLQPDDIATYYCQQYNTFSRLTFGGGTKLEIK

SEQ ID NO: 2152 - protein, 10 aa, Artificial Sequence
  Description of Artificial Sequence: Synthetic peptide
QQYNTFSRLT

SEQ ID NO: 2153 - DNA, 346 bp, Artificial Sequence
  Description of Artificial Sequence: Synthetic polynucleotide
caggtgcagctggtggagtctgggggaggcgtggtccagcctgggaggtccctgagactctcctgtgcagcctctggattcagcttcaataactatggtatgcactgggtccgccaggctccaggcaaggggctggagtggatagcagttctctcatatgatggaaccactagaaactacgcagactccgtgaagggccgattcaccatctccagagacaattccaagaacacgctgtatctgcaaatgaacagcctgagagttgaggacacggctgtgtattattgtgtgagagcggcttggttcgacccctggggccagggaaccctggtcaccgtctcctcag

SEQ ID NO: 2154 - protein, 115 aa, Artificial Sequence
  Description of Artificial Sequence: Synthetic polypeptide
QVQLVESGGGVVQPGRSLRLSCAASGFSFNNYGMHWVRQAPGKGLEWIAVLSYDGTTRNYADSVKGRFTISRDNSKNTLYLQMNSLRVEDTAVYYCVRAAWFDPWGQGTLVTVSS

SEQ ID NO: 2155 - protein, 8 aa, Artificial Sequence
  Description of Artificial Sequence: Synthetic peptide
VRAAWFDP

SEQ ID NO: 2156 - DNA, 322 bp, Artificial Sequence
  Description of Artificial Sequence: Synthetic polynucleotide
gacatccagatgacccagtctccatcctccctgtctgcatctgtaggagacagagtcacaatcacttgccaggcgagtcaggacattagcaactatttaaattggtatcagcagaaaccaggcaaagcccctaagctcctggtctccgatgcatccaatttggaggcaggggtcccatcaaggttcagtggaagtggatctgggacagattttactttcaccatcagcggcctgcagcctgaagatattgcaacatattactgtcaacagtatgataaatttcggtggactttcggccaagggaccaaggtggaaatcaaac

SEQ ID NO: 2157 - protein, 107 aa, Artificial Sequence
  Description of Artificial Sequence: Synthetic polypeptide
DIQMTQSPSSLSASVGDRVTITCQASQDISNYLNWYQQKPGKAPKLLVSDASNLEAGVPSRFSGSGSGTDFTFTISGLQPEDIATYYCQQYDKFRWTFGQGTKVEIK

SEQ ID NO: 2158 - protein, 9 aa, Artificial Sequence
  Description of Artificial Sequence: Synthetic peptide
QQYDKFRWT

SEQ ID NO: 2159 - DNA, 352 bp, Artificial Sequence
  Description of Artificial Sequence: Synthetic polynucleotide
caggtccagctggtgcagtctggggctgaggtgaagaggcctgggtcctcggtgaaggtctcctgcaaggcttctggaggcaccttcagcaactacgctatcaactgggtgcgacaggcccctggacaagggctcgagtggatgggaggaatcatcccgtcttttggaacaccaaattacgcacagaagttccagggcagagtcacgattactgcggacaaatccacgagcacagcctacatggagctgagcaggctgacatctgaggacacggccgtgttttactgtgcgagaagttcgggctggtcacttgactattggggccagggaaccttcgtcagcgtctcgtcag

SEQ ID NO: 2160 - protein, 117 aa, Artificial Sequence
  Description of Artificial Sequence: Synthetic polypeptide
QVQLVQSGAEVKRPGSSVKVSCKASGGTFSNYAINWVRQAPGQGLEWMGGIIPSFGTPNYAQKFQGRVTITADKSTSTAYMELSRLTSEDTAVFYCARSSGWSLDYWGQGTFVSVSS

SEQ ID NO: 2161 - protein, 10 aa, Artificial Sequence
  Description of Artificial Sequence: Synthetic peptide
ARSSGWSLDY

SEQ ID NO: 2162 - DNA, 337 bp, Artificial Sequence
  Description of Artificial Sequence: Synthetic polynucleotide
gatattgtgatgactcagtctccactctccctgcccgtcacccctggagagccggcctccatctcctgcaggtctagtcagagcctcctggatagttatggaaacaactatttggaatggtacctgcagaaggcagggcagtctccacagctcctgatctatttgggttctaatcgggcctccggggtccctgacaggttcagtggcagtggatcaggcacagattttacactgaaaatcagcagagtggaggctgaggatgttggggtttattactgcatgcaaggtctacaaactccgtacacttttggccaggggaccaagctggagatcaaac

SEQ ID NO: 2163 - protein, 112 aa, Artificial Sequence
  Description of Artificial Sequence: Synthetic polypeptide
DIVMTQSPLSLPVTPGEPASISCRSSQSLLDSYGNNYLEWYLQKAGQSPQLLIYLGSNRASGVPDRFSGSGSGTDFTLKISRVEAEDVGVYYCMQGLQTPYTFGQGTKLEIK

SEQ ID NO: 2164 - protein, 9 aa, Artificial Sequence
  Description of Artificial Sequence: Synthetic peptide
MQGLQTPYT

SEQ ID NO: 2165 - DNA, 355 bp, Artificial Sequence
  Description of Artificial Sequence: Synthetic polynucleotide
caggtgcagctggtgcagtctggggctgaggtgaggaagcctgggtcctcggtgaaggtctcctgcaaggcttctggaggcaccttcagcaactttgctatcaactggatacgactggcccctggacaagggcttgagtggatgggaggcatcatccctatctttggtgcagcaaactacgcacagaaattccagggcagagtcacgattaccgcggacgaatccacgaagacagcccacatggagctgcgcagcctgacatcagaggacacggccgtattctactgtgcgagaactgggggctacgggtctcttgacgactggggccagggaaccctggtcaccgtctcctcag

SEQ ID NO: 2166 - protein, 118 aa, Artificial Sequence
  Description of Artificial Sequence: Synthetic polypeptide
QVQLVQSGAEVRKPGSSVKVSCKASGGTFSNFAINWIRLAPGQGLEWMGGIIPIFGAANYAQKFQGRVTITADESTKTAHMELRSLTSEDTAVFYCARTGGYGSLDDWGQGTLVTVSS

SEQ ID NO: 2167 - protein, 11 aa, Artificial Sequence
  Description of Artificial Sequence: Synthetic peptide
ARTGGYGSLDD

SEQ ID NO: 2168 - DNA, 337 bp, Artificial Sequence
  Description of Artificial Sequence: Synthetic polynucleotide
gatattgtgatgactcagtctccactctccctgcccgtcacccctggagagccggcctccatctcctgcaggtctagtcagagcctcctgaatagaaatggatacaactatttggattggtacctgcagaagccagggcagtctccacagctcctgatctatttgggttctaatcgggcctccggggtccctgacaggttcagtggcagtggatcaggcacagattttacactgaaaatcagcagagtggaggctgaggatgttggggtttattactgcatgcaagctctacaaaccccgctgactttcggcggagggaccaaggtggagatcaaac

SEQ ID NO: 2169 - protein, 112 aa, Artificial Sequence
  Description of Artificial Sequence: Synthetic polypeptide
DIVMTQSPLSLPVTPGEPASISCRSSQSLLNRNGYNYLDWYLQKPGQSPQLLIYLGSNRASGVPDRFSGSGSGTDFTLKISRVEAEDVGVYYCMQALQTPLTFGGGTKVEIK

SEQ ID NO: 2170 - protein, 9 aa, Artificial Sequence
  Description of Artificial Sequence: Synthetic peptide
MQALQTPLT

SEQ ID NO: 2171 - DNA, 352 bp, Artificial Sequence
  Description of Artificial Sequence: Synthetic polynucleotide
caggtgcagctggtgcagtctggggctgaggtgaagaagcctgggtcctcggtaaaggtctcctgcaagacttctggaggcaccttcagcaactatgaaatcacttgggtgcgacaggcccctggacaagggcttgaatggatgggaggggtgatccctatttttggaacaccaaactacgcacagaagttccagggcagagtcacgattagcgcggacgaatccacgagtacagcctacatggagctgagcagcctgcgatccgaggacacggccatgtattattgtgcgaagagcagtggctggtcttttgactattggggccagggaacccaggtcaccgtctcctcag

SEQ ID NO: 2172 - protein, 117 aa, Artificial Sequence
  Description of Artificial Sequence: Synthetic polypeptide
QVQLVQSGAEVKKPGSSVKVSCKTSGGTFSNYEITWVRQAPGQGLEWMGGVIPIFGTPNYAQKFQGRVTISADESTSTAYMELSSLRSEDTAMYYCAKSSGWSFDYWGQGTQVTVSS

SEQ ID NO: 2173 - protein, 10 aa, Artificial Sequence
  Description of Artificial Sequence: Synthetic peptide
AKSSGWSFDY

SEQ ID NO: 2174 - DNA, 337 bp, Artificial Sequence
  Description of Artificial Sequence: Synthetic polynucleotide
gatattgtgatgactcagtctccactctccctgcccgtcacccctggagagccggcctccatctcctgcaggtctagtcagagcctcctgaatagtgatggatacaactatttggattggtacctgcagaagccagggcagtctccacagctcctgatctatttgggttctaatcgggcctccggggtccctgacaggttcagtggcagtggatcaggcacagattttacactgaaaatcagcagagtggaggctgaggatgttggggtttattactgcatgcaatggatacaaaaatcgtacacttttggccaggggaccaagctggagatcaaac

SEQ ID NO: 2175 - protein, 112 aa, Artificial Sequence
  Description of Artificial Sequence: Synthetic polypeptide
DIVMTQSPLSLPVTPGEPASISCRSSQSLLNSDGYNYLDWYLQKPGQSPQLLIYLGSNRASGVPDRFSGSGSGTDFTLKISRVEAEDVGVYYCMQWIQKSYTFGQGTKLEIK

SEQ ID NO: 2176 - protein, 9 aa, Artificial Sequence
  Description of Artificial Sequence: Synthetic peptide
MQWIQKSYT

SEQ ID NO: 2177 - DNA, 376 bp, Artificial Sequence
  Description of Artificial Sequence: Synthetic polynucleotide
caggtgcagctggtggagtctgggggaggcgtggtccagcctgggaggtccctgagactctcctgtgcagcctctggattcaccttcacttcccatagcatgcactggcttcgccaggctccgggcaaggggctggagtgggtggctgttatttggtatgatggaagtaatgaaaactatgcagactccgcgaggggccgattcaccatctccagagacaatctccagaacacggtatatctgcaaatgaccagcctgcgacccgaggacacggctgtctattattgtgcgagagatggtattggaccagcctgggccgagataaacaattggttcgacccctggggccagggaaccctggtcaccgtctcctcag

SEQ ID NO: 2178 - protein, 125 aa, Artificial Sequence
  Description of Artificial Sequence: Synthetic polypeptide
QVQLVESGGGVVQPGRSLRLSCAASGFTFTSHSMHWLRQAPGKGLEWVAVIWYDGSNENYADSARGRFTISRDNLQNTVYLQMTSLRPEDTAVYYCARDGIGPAWAEINNWFDPWGQGTLVTVSS

SEQ ID NO: 2179 - protein, 18 aa, Artificial Sequence
  Description of Artificial Sequence: Synthetic peptide
ARDGIGPAWAEINNWFDP

SEQ ID NO: 2180 - DNA, 322 bp, Artificial Sequence
  Description of Artificial Sequence: Synthetic polynucleotide
gaaatagtgatgacgcagtctccagccaccctgtctgtgtctccaggggcgagagccaccctctcctgcagggccagtcggagtgttaccaccaacttggcctggtaccagcagaaacctggccaggctcccaggctcctcatctacggtgcatccaccagggccactggtatcccagccaggttcagtggcagtgggtctgggacagagttcactctcaccatcagcagtctgcagtctgaagattttggagtttattactgtcagcagtatgattactggccgctcaccttcggccaagggacacgactggcgattaaac

SEQ ID NO: 2181 - protein, 107 aa, Artificial Sequence
  Description of Artificial Sequence: Synthetic polypeptide
EIVMTQSPATLSVSPGARATLSCRASRSVTTNLAWYQQKPGQAPRLLIYGASTRATGIPARFSGSGSGTEFTLTISSLQSEDFGVYYCQQYDYWPLTFGQGTRLAIK

SEQ ID NO: 2182 - protein, 9 aa, Artificial Sequence
  Description of Artificial Sequence: Synthetic peptide
QQYDYWPLT

SEQ ID NO: 2183 - DNA, 361 bp, Artificial Sequence
  Description of Artificial Sequence: Synthetic polynucleotide
caggtgcagctggtggagtctgggggaggcggggtccagcctgggaggtccctgagactctcctgtgcagcctctggattcaccttcattagctatgctttgcactgggtccgccaggctccaggcaaggggctggagtgggtggcagttatatcatatgatggaagcaataaatactacgcagactccgtgaagggccgattcaccatctccagagacaattccaagaacacgctgtatctgcaaatgaacagcctgagacctgaggacacggctgtgtattactgtgcgaggctagcgggagctactatgggcctctctgactactggggccagggaaccctggtcaccgtctcctcag

SEQ ID NO: 2184 - protein, 120 aa, Artificial Sequence; identical to SEQ ID NO: 59
  Description of Artificial Sequence: Synthetic polypeptide

SEQ ID NO: 2185 - protein, 13 aa, Artificial Sequence
  Description of Artificial Sequence: Synthetic peptide
ARLAGATMGLSDY

SEQ ID NO: 2186 - DNA, 334 bp, Artificial Sequence
  Description of Artificial Sequence: Synthetic polynucleotide
cagtctgtgctgactcagtcatcctctgcctctgcttccctgggatcctcggtcaagctcacctgcactctgagcagtgggcacagtaactacatcatcgcatggcatcagcagcagccagggaaggcccctcggtatttgatgaaccttgaaggtagtggaaactacaacaaggggagcggagttcctgatcgcttctcaggctccagctctggggctgaccgctacctctccatctccaacctccagtctgaggatgaggctgattattactgtgagacctgggccagtaacactcgggtttttggcggagggaccaagctggccgtcctag

SEQ ID NO: 2187 - protein, 111 aa, Artificial Sequence
  Description of Artificial Sequence: Synthetic polypeptide
QSVLTQSSSASASLGSSVKLTCTLSSGHSNYIIAWHQQQPGKAPRYLMNLEGSGNYNKGSGVPDRFSGSSSGADRYLSISNLQSEDEADYYCETWASNTRVFGGGTKLAVL

SEQ ID NO: 2188 - protein, 9 aa, Artificial Sequence
  Description of Artificial Sequence: Synthetic peptide
ETWASNTRV

SEQ ID NO: 2189 - DNA, 381 bp, Artificial Sequence
  Description of Artificial Sequence: Synthetic polynucleotide
caggtgcagctgcaggagtcgggcccaggactggtgaagccttcacagaccctgtccctcacatgcactgtctctggtgactccatcagcagtggtgattattactggagttggatccgccagtccccagcgaagggcctggagtggattgggcacatctattacagtgggagcgcctactacaacccgtccctcaagagtcgagttcgcctatcagtagacatgtccaagaaccagttctccctgaaactgacctctgtgactgccgcagacacggccgtttatttctgtgccagagattcggcgtattacgagcatttgggtggtcggccctacggtatggacgtctggggccaggggaccacggtcaccgtctcctca

SEQ ID NO: 2190 - protein, 127 aa, Artificial Sequence
  Description of Artificial Sequence: Synthetic polypeptide
QVQLQESGPGLVKPSQTLSLTCTVSGDSISSGDYYWSWIRQSPAKGLEWIGHIYYSGSAYYNPSLKSRVRLSVDMSKNQFSLKLTSVTAADTAVYFCARDSAYYEHLGGRPYGMDVWGQGTTVTVSS

SEQ ID NO: 2191 - protein, 19 aa, Artificial Sequence
  Description of Artificial Sequence: Synthetic peptide
ARDSAYYEHLGGRPYGMDV

SEQ ID NO: 2192 - DNA, 331 bp, Artificial Sequence
  Description of Artificial Sequence: Synthetic polynucleotide
cagtctgtgctgactcagccaccctcagcgtctgggacccccgggcagagggtcttcatctcttgttccggaagcagttccaacatcgggggtaattatgtatactggtaccagcagctcccaggaacggcccccaaactcctcatctttggtgttaatcagcggccctcaggggtccctgaccgattctctggctccaagtctggcacctcagcctccctggccatcagtggactccggtccgaggatgaggctgattattattgtgcagcatgggatgacagtctgagtggttatgtcttcggacctgggaccaaggtcaccgtcctag

SEQ ID NO: 2193 - protein, 110 aa, Artificial Sequence
  Description of Artificial Sequence: Synthetic polypeptide
QSVLTQPPSASGTPGQRVFISCSGSSSNIGGNYVYWYQQLPGTAPKLLIFGVNQRPSGVPDRFSGSKSGTSASLAISGLRSEDEADYYCAAWDDSLSGYVFGPGTKVTVL

SEQ ID NO: 2194 - protein, 11 aa, Artificial Sequence
  Description of Artificial Sequence: Synthetic peptide
AAWDDSLSGYV

SEQ ID NO: 2195 - DNA, 355 bp, Artificial Sequence
  Description of Artificial Sequence: Synthetic polynucleotide
caggtgcagctggtgcagtctggggctgaggtgaagaggcctggggcctcagtgaaggtctcctgcaagacttctgggtacaccttcaccggctactatgtgcactgggtgcgacaggcccctggacaagggcttgagtggatgggatggatcaaccctaacaatggtggcacaaaatatgcacagaactttcagggcagggtcaccatgaccagggactcgtccatcggcacattcttcatggagttgagcagactgagatctgatgacacggccttgtattactgtgcgagggatggtcatatggtctaccttgactactggggccagggaaccccggtcaccgtctcctcag

SEQ ID NO: 2196 - protein, 118 aa, Artificial Sequence
  Description of Artificial Sequence: Synthetic polypeptide
QVQLVQSGAEVKRPGASVKVSCKTSGYTFTGYYVHWVRQAPGQGLEWMGWINPNNGGTKYAQNFQGRVTMTRDSSIGTFFMELSRLRSDDTALYYCARDGHMVYLDYWGQGTPVTVSS

SEQ ID NO: 2197 - protein, 11 aa, Artificial Sequence
  Description of Artificial Sequence: Synthetic peptide
ARDGHMVYLDY

SEQ ID NO: 2198 - DNA, 331 bp, Artificial Sequence
  Description of Artificial Sequence: Synthetic polynucleotide
cagtctgtgctgactcagcctgcctccgtgtctgggtctcctggccagtcgatcaccatctcctgcactggaaccagcagtgatgttgggaattatgactttgtctcgtggtaccaacaacacccaggcaaagcccccaaactcatgatttatgaggtcactaagcggccctcaggggtttctaatcgcttctctgggtccaagtctggcaacacggcctccctgacaatctctggactccaggctgaggacgaggctgattattactgctgctcatatgcaggtactagcacccgggtgttcggcggagggaccacgctgaccgtcctag

SEQ ID NO: 2199 - protein, 110 aa, Artificial Sequence
  Description of Artificial Sequence: Synthetic polypeptide
QSVLTQPASVSGSPGQSITISCTGTSSDVGNYDFVSWYQQHPGKAPKLMIYEVTKRPSGVSNRFSGSKSGNTASLTISGLQAEDEADYYCCSYAGTSTRVFGGGTTLTVL

SEQ ID NO: 2200 - protein, 10 aa, Artificial Sequence
  Description of Artificial Sequence: Synthetic peptide
CSYAGTSTRV

SEQ ID NO: 2201 - DNA, 357 bp, Artificial Sequence
  Description of Artificial Sequence: Synthetic polynucleotide
caggtgcagctggtgcagtctggggctgaggtgaagaagcctggggcctcagtgaaggtctcctgcaagacttcaggctacattttcaccggctactatattcactgggtgcggcaggcccctgggcaaggacttgagtggatgggaaggatcaaccctaacagtggtgacacacatcttgcacagaagtttcagggcagggtcaccatgaccagggacacatccatcaccacaatgtacatgtacctgagcagcctaacatctgacgacacggccgtatattactgtgcgaaagatttagggacggcggtctatatggacgtctggggccaagggaccacgatcaccgtcttctca

SEQ ID NO: 2202 - protein, 119 aa, Artificial Sequence
  Description of Artificial Sequence: Synthetic polypeptide
QVQLVQSGAEVKKPGASVKVSCKTSGYIFTGYYIHWVRQAPGQGLEWMGRINPNSGDTHLAQKFQGRVTMTRDTSITTMYMYLSSLTSDDTAVYYCAKDLGTAVYMDVWGQGTTITVFS

SEQ ID NO: 2203 - protein, 12 aa, Artificial Sequence
  Description of Artificial Sequence: Synthetic peptide
AKDLGTAVYMDV

SEQ ID NO: 2204 - DNA, 331 bp, Artificial Sequence
  Description of Artificial Sequence: Synthetic polynucleotide
cagtctgtgctgactcagcctccctccgcgtccgggtctccgggacagtcggtcatcatctcctgcactggaaccagcagtgacgttggtgcttttaactttgtctcctggtaccaacagcgcccaggcaaagtccccaaactcattatttatgacgtcactaagcggccctcaggggtccctggtcgtttctctggctccaagtctggcaacacggcctccctgaccgtctctgggctccaggctgaggatgaggctacttattactgcttctcatatgcaggcagaaacaatttgtttttcggcggcgggaccaagctgaccgtcctag

SEQ ID NO: 2205 - protein, 110 aa, Artificial Sequence
  Description of Artificial Sequence: Synthetic polypeptide
QSVLTQPPSASGSPGQSVIISCTGTSSDVGAFNFVSWYQQRPGKVPKLIIYDVTKRPSGVPGRFSGSKSGNTASLTVSGLQAEDEATYYCFSYAGRNNLFFGGGTKLTVL

SEQ ID NO: 2206 - protein, 10 aa, Artificial Sequence
  Description of Artificial Sequence: Synthetic peptide
FSYAGRNNLF

SEQ ID NO: 2207 - DNA, 352 bp, Artificial Sequence
  Description of Artificial Sequence: Synthetic polynucleotide
caggtgcagctggtgcagtctggggctgaggtgaagaagcctggggcctcagtgaaggtctcctgtaagacttctggatacaccttcaccggctactatatgcactgggtgcgacaggcccctggacaagggcttgagtggatgggacggatcaatcctaatagtggtggcacagactttgcacagaagtttcagggcagggtcaccatgaccagggacacgtccatcaccacagcctacatgcaactgagcagcctgagatctgacgacacggccgtctattactgcgcgagaggggaccagctgccggggggctactggggccagggaaccctggtcatcgtctcgtcag

SEQ ID NO: 2208 - protein, 117 aa, Artificial Sequence
  Description of Artificial Sequence: Synthetic polypeptide
QVQLVQSGAEVKKPGASVKVSCKTSGYTFTGYYMHWVRQAPGQGLEWMGRINPNSGGTDFAQKFQGRVTMTRDTSITTAYMQLSSLRSDDTAVYYCARGDQLPGGYWGQGTLVIVSS

SEQ ID NO: 2209 - protein, 10 aa, Artificial Sequence
  Description of Artificial Sequence: Synthetic peptide
ARGDQLPGGY

SEQ ID NO: 2210 - DNA, 318 bp, Artificial Sequence
  Description of Artificial Sequence: Synthetic polynucleotide
tcctatgtgctgactcaggcaccctcagtgtccgtgtccccaggacagacagccagcatcacctgctctggagatcaattggggcatagatatgcttcctggtttcagcagaagccaggccagtcccctgttctggtcatctatcaagataccaagcggccctcagggatccctgggcgcttctctggctccaagtctgggaacacagccactctgaccatcagcgggacccaggttatggatgaggctgactattactgtctggcgtgggacatcagcgccgtggttttcggcggagggaccaagctgaccgtccta

SEQ ID NO: 2211 - protein, 106 aa, Artificial Sequence
  Description of Artificial Sequence: Synthetic polypeptide
SYVLTQAPSVSVSPGQTASITCSGDQLGHRYASWFQQKPGQSPVLVIYQDTKRPSGIPGRFSGSKSGNTATLTISGTQVMDEADYYCLAWDISAVVFGGGTKLTVL

SEQ ID NO: 2212 - protein, 9 aa, Artificial Sequence
  Description of Artificial Sequence: Synthetic peptide
LAWDISAVV

SEQ ID NO: 2213 - DNA, 358 bp, Artificial Sequence
  Description of Artificial Sequence: Synthetic polynucleotide
caggtgcagctggtgcagtctgggactgaggtgaagaagcctggggcctcagtgaaggtctcctgcagggcttctggatacaccttcaccggctactatttacactgggtgcgacaggcccccggacaagggcttgactacatgggacggatcaaccccaacaatggtgacacaaattatgcacagaaatttcagggcagggtcaccatgaccagggacacgtccagcaccactttctacatggaactcatcaggctaaaatctgacgacacggccgtgtattactgtgcgaaagatcagggcagcggctggttgttcgactcctggggccagggaaccctggtcaccgtctcctcag

SEQ ID NO: 2214 - protein, 119 aa, Artificial Sequence
  Description of Artificial Sequence: Synthetic polypeptide
QVQLVQSGTEVKKPGASVKVSCRASGYTFTGYYLHWVRQAPGQGLDYMGRINPNNGDTNYAQKFQGRVTMTRDTSSTTFYMELIRLKSDDTAVYYCAKDQGSGWLFDSWGQGTLVTVSS

SEQ ID NO: 2215 - protein, 12 aa, Artificial Sequence
  Description of Artificial Sequence: Synthetic peptide
AKDQGSGWLFDS

SEQ ID NO: 2216 - DNA, 331 bp, Artificial Sequence
  Description of Artificial Sequence: Synthetic polynucleotide
cagtctgtgctgactcagcctccctccgcgtccgggtctcctggacagtcagtcaccatctcctgcactggaaccagcagggacgttggtttttataactatgtctcctggtaccaacagcacccaggcaaagcccccaaactcatgatttatgacgtcactaagcggccctcaggggtccctgatcgcttctctggctccaggtctggcaacacggcctccctgaccgtctctgggctccaggctgaggatgaggctgattattactgcagctcatatgcaggcagcaacaatttgttattaggcggagggaccaagctgaccgtcctag

SEQ ID NO: 2217 - protein, 110 aa, Artificial Sequence
  Description of Artificial Sequence: Synthetic polypeptide
QSVLTQPPSASGSPGQSVTISCTGTSRDVGFYNYVSWYQQHPGKAPKLMIYDVTKRPSGVPDRFSGSRSGNTASLTVSGLQAEDEADYYCSSYAGSNNLLLGGGTKLTVL

SEQ ID NO: 2218 - protein, 10 aa, Artificial Sequence
  Description of Artificial Sequence: Synthetic peptide
SSYAGSNNLL

SEQ ID NO: 2219 - DNA, 358 bp, Artificial Sequence
  Description of Artificial Sequence: Synthetic polynucleotide
caggtgcagctggtgcagtctgggactgaagtgaagaagcctggggcctcggtgaaggtctcctgcaaggcttctggatacaccgtcaccggctattatatgcactgggtgcgacaggcccctggacaagggcttgagtggatgggacggatcaaccccaacaatggtgccccaaactatgtacacaagtttcagggcagggtcaccatgacctgggacatgtccgtcagcacagcctacatggaactgagcagcctgacatctgccgacacggccgtctattactgtgcgaaggatggcggcagtggctttgtgtttggcgactggggccagggaaccctggtcaccgtctcctcag

SEQ ID NO: 2220 - protein, 119 aa, Artificial Sequence
  Description of Artificial Sequence: Synthetic polypeptide
QVQLVQSGTEVKKPGASVKVSCKASGYTVTGYYMHWVRQAPGQGLEWMGRINPNNGAPNYVHKFQGRVTMTWDMSVSTAYMELSSLTSADTAVYYCAKDGGSGFVFGDWGQGTLVTVSS

SEQ ID NO: 2221 - protein, 12 aa, Artificial Sequence
  Description of Artificial Sequence: Synthetic peptide
AKDGGSGFVFGD

SEQ ID NO: 2222 - DNA, 329 bp, Artificial Sequence
  Description of Artificial Sequence: Synthetic polynucleotide
cagtctgtgctgactcagcctccctccgcgtccgggtctcctggacagtcggtcaccatctcctgctctggaaccagccgtgacgttggtttttataactatgtctcctggtaccaacaacacccaggcaaagcccccagactcgtgattcatgaggtcactaagcggccctcaggggtccctgctcgtttctctggctcccagtctggcaatacggcctccctgaccgtctctgggctccaggctgaggatgaggctgactattactgcagttcatatgccggcagcaacaatttggtgttcggcggagggaccaagctgaccgtcct

SEQ ID NO: 2223 - protein, 109 aa, Artificial Sequence
  Description of Artificial Sequence: Synthetic polypeptide
QSVLTQPPSASGSPGQSVTISCSGTSRDVGFYNYVSWYQQHPGKAPRLVIHEVTKRPSGVPARFSGSQSGNTASLTVSGLQAEDEADYYCSSYAGSNNLVFGGGTKLTV

SEQ ID NO: 2224 - protein, 10 aa, Artificial Sequence
  Description of Artificial Sequence: Synthetic peptide
SSYAGSNNLV

SEQ ID NO: 2225 - DNA, 367 bp, Artificial Sequence
  Description of Artificial Sequence: Synthetic polynucleotide
caggtgcagctggtgcagtctgggactgaggtgaagaagcctggggcctcagtgaaggtctcctgcagggcctctggatacatgttcaccggctactatttgcactgggtgcggcaggcccctggacaagggcttgagtggatgggacggatggacccaaacggtggtgacgcagactatgcacagaactttcagggcagggtcaccatgaccagggacacgtccatcagcacagcctacatggagttgaggaggctgagatctgacgacacggccgtttatttctgtctgagacgggattattatggttcggggagttatggggttgacttctggggccagggaaccctggtcagcgtctcctcag

SEQ ID NO: 2226 - protein, 122 aa, Artificial Sequence
  Description of Artificial Sequence: Synthetic polypeptide
QVQLVQSGTEVKKPGASVKVSCRASGYMFTGYYLHWVRQAPGQGLEWMGRMDPNGGDADYAQNFQGRVTMTRDTSISTAYMELRRLRSDDTAVYFCLRRDYYGSGSYGVDFWGQGTLVSVSS

SEQ ID NO: 2227 - protein, 15 aa, Artificial Sequence
  Description of Artificial Sequence: Synthetic peptide
LRRDYYGSGSYGVDF

SEQ ID NO: 2228 - DNA, 331 bp, Artificial Sequence
  Description of Artificial Sequence: Synthetic polynucleotide
cagtctgtgctgactcagcctgcctccgtgtcggggtctcctggacagtcgatcaccatcacctgcactggcaccagcagtgacgttggtggttatgactttgtctcctggtgccaacagcacccaggcaaagcccccaaactcatgatttatgatgtcaataagcggccctcaggggtttctagtcgcttctctggctccaagtctggcaacacggcctccctgaccatctctgggctccaggctgaggacgaggctgattattactgcaactcttttaccaccaccaacagtgtggtcttcggcggagggaccagactgaccgtcctag

SEQ ID NO: 2229 - protein, 110 aa, Artificial Sequence
  Description of Artificial Sequence: Synthetic polypeptide
QSVLTQPASVSGSPGQSITITCTGTSSDVGGYDFVSWCQQHPGKAPKLMIYDVNKRPSGVSSRFSGSKSGNTASLTISGLQAEDEADYYCNSFTTTNSVVFGGGTRLTVL

SEQ ID NO: 2230 - protein, 10 aa, Artificial Sequence
  Description of Artificial Sequence: Synthetic peptide
NSFTTTNSVV

SEQ ID NO: 2231 - DNA, 356 bp, Artificial Sequence
  Description of Artificial Sequence: Synthetic polynucleotide
caggtgcagctggtgcagtctggggctgagatgaagaagcctggggcctcagtgaaggtctcctgcaagacttctggatacatcttcaccggctactatatacactgggtgcgccaggcccctggacaagggcttgagtggatgggacgggtcaaccctaacagtgatggcgcacactatgcacggaagtttcagggcagggtcaccctgaccagggacacgtccatcagcacggccttcttggaggtgaacaggctgagatctgacgacacggccgtctattactgtgccagagattcgggggtcggatgggaactgcaagactggggccagggaaccttggtcaccgtctcctc

SEQ ID NO: 2232 - protein, 118 aa, Artificial Sequence
  Description of Artificial Sequence: Synthetic polypeptide
QVQLVQSGAEMKKPGASVKVSCKTSGYIFTGYYIHWVRQAPGQGLEWMGRVNPNSDGAHYARKFQGRVTLTRDTSISTAFLEVNRLRSDDTAVYYCARDSGVGWELQDWGQGTLVTVS

SEQ ID NO: 2233 - protein, 12 aa, Artificial Sequence
  Description of Artificial Sequence: Synthetic peptide
ARDSGVGWELQD

SEQ ID NO: 2234 - DNA, 331 bp, Artificial Sequence
  Description of Artificial Sequence: Synthetic polynucleotide
cagtctgtgctgactcagcctccctccgcgtccgggtctcctggacagtcagtcaccatctcctgcactggaaccagcagtgacgttggtaaatatgactttgtctcctggtatcagcatcacccaggcaaggcccccaaactcatcatttatgaggtcagtaagcggccctcaggggtccctcatcgcttctctggctccaagtctggcaacacggcctccctgaccgtctctgggctccaggctgaggatgaggctgattattactgcagctcatatgcaggcaccaacttatttgtcttcggcactgggaccaaggtcaccgtcctag

SEQ ID NO: 2235 - protein, 110 aa, Artificial Sequence
  Description of Artificial Sequence: Synthetic polypeptide
QSVLTQPPSASGSPGQSVTISCTGTSSDVGKYDFVSWYQHHPGKAPKLIIYEVSKRPSGVPHRFSGSKSGNTASLTVSGLQAEDEADYYCSSYAGTNLFVFGTGTKVTVL

SEQ ID NO: 2236 - protein, 10 aa, Artificial Sequence
  Description of Artificial Sequence: Synthetic peptide
SSYAGTNLFV

SEQ ID NO: 2237 - DNA, 357 bp, Artificial Sequence
  Description of Artificial Sequence: Synthetic polynucleotide
caggtgcagctggtgcagtctggggctgaggtgaagaagcctggggcctcagtgaaggtctcctgcaaggcttctggatacaccttcaccggctactatatgcactgggtgcgacaggcccctggacaagggcttcagtggatgggacggatcaaccctaacagtggtggcacaaactatgtacagaagtttcagggcagggtcaccatgaccagggacatgtccatcagcacagcctacatggagctgagtaggctgagacctgacgacacggccgtatattactgtgcgagagatggagggactggggtctgtatggacgtctggggcctagggaccacggtcaccgtctcctca

SEQ ID NO: 2238 - protein, 119 aa, Artificial Sequence; identical to SEQ ID NO: 41
  Description of Artificial Sequence: Synthetic polypeptide

SEQ ID NO: 2239 - protein, 12 aa, Artificial Sequence
  Description of Artificial Sequence: Synthetic peptide
ARDGGTGVCMDV

SEQ ID NO: 2240 - DNA, 331 bp, Artificial Sequence
  Description of Artificial Sequence: Synthetic polynucleotide
cagtctgtgctgactcagcctccctccgcgtccgggtctcctggacagtcagtcaccatctcctgcactggaaccaacagtgacattggtgcttataactatgtctcctggtaccaacagcacccaggcaaagcccccaaactcatgatttatgaggtcagtaagcggccctcaggggtccctgatcgcttctctggctccaagtctggcaacacggcctccctgaccgtctctgggctccaggctgaggatgaggctgattattactgcatctcatatgcaggcagcaacaatttggtattcggcggagggaccaagctgaacgtcctag

SEQ ID NO: 2241 - protein, 110 aa, Artificial Sequence
  Description of Artificial Sequence: Synthetic polypeptide
QSVLTQPPSASGSPGQSVTISCTGTNSDIGAYNYVSWYQQHPGKAPKLMIYEVSKRPSGVPDRFSGSKSGNTASLTVSGLQAEDEADYYCISYAGSNNLVFGGGTKLNVL

SEQ ID NO: 2242 - protein, 10 aa, Artificial Sequence
  Description of Artificial Sequence: Synthetic peptide
ISYAGSNNLV

SEQ ID NO: 2243 - DNA, 373 bp, Artificial Sequence
  Description of Artificial Sequence: Synthetic polynucleotide
caggtgcagctggtggagtctgggggaggcttggtcaagcctggagggtccctaagactctcctgtgcagcctctggattcaccttcagtgactactacatgacctggatccgtcaagccccagggaaggggctggagtgggtttcacacattggtagtactactggtcacacagagtacgcagaatctgtgaggggccgattcaccatctccagagacaacgccaagaattcagtgtatctgcaaatgaacagcctgagagtcgaggacacggccgtgtattactgtgcgcgagaccgccggtttagcagcacctggtacttcaactggttcgacccctggggccagggaaccctggtcaccgtctcctcag

SEQ ID NO: 2244 - protein, 124 aa, Artificial Sequence
  Description of Artificial Sequence: Synthetic polypeptide
QVQLVESGGGLVKPGGSLRLSCAASGFTFSDYYMTWIRQAPGKGLEWVSHIGSTTGHTEYAESVRGRFTISRDNAKNSVYLQMNSLRVEDTAVYYCARDRRFSSTWYFNWFDPWGQGTLVTVSS

SEQ ID NO: 2245 - protein, 17 aa, Artificial Sequence
  Description of Artificial Sequence: Synthetic peptide
ARDRRFSSTWYFNWFDP

SEQ ID NO: 2246 - DNA, 331 bp, Artificial Sequence
  Description of Artificial Sequence: Synthetic polynucleotide
aattttatgctgactcagccgcactctgtgtcggggtctccggggaagacggttaccatctcctgcacccgcagcgttggcagcattgccagcaactatgtgcagtggtaccagcagcgcccgggcagtgcccccaccacagtgatctacgaagataaccaaagaccttctggggtccctgatcggttctctggctccatcgacagctcctccaactctgcctccctcaccatctctggactgaggactgaggacggggctgactactactgtcagtcttatgataccggccatgtggtgttcggcggagggaccaagctgaccgtcctag

SEQ ID NO: 2247 - protein, 110 aa, Artificial Sequence
  Description of Artificial Sequence: Synthetic polypeptide
NFMLTQPHSVSGSPGKTVTISCTRSVGSIASNYVQWYQQRPGSAPTTVIYEDNQRPSGVPDRFSGSIDSSSNSASLTISGLRTEDGADYYCQSYDTGHVVFGGGTKLTVL

SEQ ID NO: 2248 - protein, 9 aa, Artificial Sequence
  Description of Artificial Sequence: Synthetic peptide
QSYDTGHVV

SEQ ID NO: 2249 - DNA, 399 bp, Artificial Sequence
  Description of Artificial Sequence: Synthetic polynucleotide
caggttcagctggtgcagtctggaggtgaactgaagaaaccgggggcctcagtgagggtctcctgtaaggcttctggctacatctttagcacctatgatatgaattgggtgcgacaggcccctggacaagggcttgagtgggtgggctggatcagcgcttacagtgggaagacaacctatgcacagaagctccagggcagagtcattttgaccagagacacatccacgggcacagtccacatggagctgaggagcctgagatctgacgacacggccgtctattactgtgcgagaggaggaggtggacccgatgagaatggtccgggggtccccccggggcgctactactattacggcatggacgtctggggccaagggaccacggtcaccgtctcctca

SEQ ID NO: 2250 - protein, 133 aa, Artificial Sequence
  Description of Artificial Sequence: Synthetic polypeptide
QVQLVQSGGELKKPGASVRVSCKASGYIFSTYDMNWVRQAPGQGLEWVGWISAYSGKTTYAQKLQGRVILTRDTSTGTVHMELRSLRSDDTAVYYCARGGGGPDENGPGVPPGRYYYYGMDVWGQGTTVTVSS

SEQ ID NO: 2251 - protein, 26 aa, Artificial Sequence
  Description of Artificial Sequence: Synthetic peptide
ARGGGGPDENGPGVPPGRYYYYGMDV

SEQ ID NO: 2252 - DNA, 331 bp, Artificial Sequence
  Description of Artificial Sequence: Synthetic polynucleotide
cagtctgtgctgactcagccgccctcagtgtctggggccccagggcagagggtcaccatctcctgcactgggagcacctccaacatcggggcaggttatgatgtacactggtaccagttgcttccaggaacagcccccaaactcctcatctatggcaacaacaatcggccctcaggggtccctgaccgattctctggctccaagtctggcgcctcagcctccctgaccatcactgggctccaggctgaggatgaggctgattattactgccagtcctatgacaccagcctgagtgtgttgttcggccgaggcaccaagctgaccgtcctag

SEQ ID NO: 2253 - protein, 110 aa, Artificial Sequence
  Description of Artificial Sequence: Synthetic polypeptide
QSVLTQPPSVSGAPGQRVTISCTGSTSNIGAGYDVHWYQLLPGTAPKLLIYGNNNRPSGVPDRFSGSKSGASASLTITGLQAEDEADYYCQSYDTSLSVLFGRGTKLTVL

SEQ ID NO: 2254 - protein, 10 aa, Artificial Sequence
  Description of Artificial Sequence: Synthetic peptide
QSYDTSLSVL

SEQ ID NO: 2255 - DNA, 370 bp, Artificial Sequence
  Description of Artificial Sequence: Synthetic polynucleotide
gaggtgcagctggtggagtctgggggaggcttggtccagcctggggggtccctgagactctcctgtgcaggctctggattcatgtttaataagttttggatgagttgggtccgccaggctccagggaaggggctggagtgggtggccaacataaaggaagatggaactgagaaatactatgcggactctgtgaagggccgactcaccatctccagggacaacgccaagaactcagtgtacctgcagatgaacagcctgagagccgaggacacggctgtatattactgcgcgagaattttagggcgatggatacaactatattccggctttgacttctggggccagggaaccctggtcaccgtctcctcag

SEQ ID NO: 2256 - protein, 123 aa, Artificial Sequence
  Description of Artificial Sequence: Synthetic polypeptide
EVQLVESGGGLVQPGGSLRLSCAGSGFMFNKFWMSWVRQAPGKGLEWVANIKEDGTEKYYADSVKGRLTISRDNAKNSVYLQMNSLRAEDTAVYYCARILGRWIQLYSGFDFWGQGTLVTVSS

SEQ ID NO: 2257 - protein, 16 aa, Artificial Sequence
  Description of Artificial Sequence: Synthetic peptide
ARILGRWIQLYSGFDF

SEQ ID NO: 2258 - DNA, 331 bp, Artificial Sequence
  Description of Artificial Sequence: Synthetic polynucleotide
aattttatgctgactcagccccactctgtgtcggggtctctggggaagacggtaaccatctcctgcacccgcagcagtggcagcattgccaccaactatgtgcagtggtaccagcagcgcccgggcagagcccccaccactgtgatctatgaggatgattacagaccctctggggtccctgatcggttctctggctccatcgacaggtcctccaattctgcctccctcaccatctctggactgaagactgaggacgaggctgactactactgtcagtcttatgatgtcaccacttgggtgttcggcggagggaccaagctgaccgtcctag

SEQ ID NO: 2259 - protein, 110 aa, Artificial Sequence
  Description of Artificial Sequence: Synthetic polypeptide
NFMLTQPHSVSGSLGKTVTISCTRSSGSIATNYVQWYQQRPGRAPTTVIYEDDYRPSGVPDRFSGSIDRSSNSASLTISGLKTEDEADYYCQSYDVTTWVFGGGTKLTVL

SEQ ID NO: 2260 - protein, 9 aa, Artificial Sequence
  Description of Artificial Sequence: Synthetic peptide
QSYDVTTWV

SEQ ID NO: 2261 - DNA, 367 bp, Artificial Sequence
  Description of Artificial Sequence: Synthetic polynucleotide
caggtgcagctgcaggagtcgggcccaggactggtaaagccttcggagaccctgtccctcatgtgcactgtctctggtggctccatcagtagtcactactggagctgggtccggcagcccccagggaagggactggaatggattggctatatttatcatagagggagtaccaactacaacccctccctcaagagtcgagtcaccatctcactagacaagtccaagaaccagttctccctgaagctgaggtctgtgaccgccgcagacacggccgtctattactgtgcgaaggttcacgagttttggagtggttggtcagactggttcgacccctggggccggggaaccctggtcaccgtctcctcag

SEQ ID NO: 2262 - protein, 122 aa, Artificial Sequence
  Description of Artificial Sequence: Synthetic polypeptide
QVQLQESGPGLVKPSETLSLMCTVSGGSISSHYWSWVRQPPGKGLEWIGYIYHRGSTNYNPSLKSRVTISLDKSKNQFSLKLRSVTAADTAVYYCAKVHEFWSGWSDWFDPWGRGTLVTVSS

SEQ ID NO: 2263 - protein, 16 aa, Artificial Sequence
  Description of Artificial Sequence: Synthetic peptide
AKVHEFWSGWSDWFDP

SEQ ID NO: 2264 - DNA, 334 bp, Artificial Sequence
  Description of Artificial Sequence: Synthetic polynucleotide
cagtctgtgctgactcagccgccctcagtgtctggggccccagggcagagggtcaccatctcctgcactgggagcagctccaacatcggggcaaattatgatgtacactggtaccaacaacttccagggacggcccccaaactcctcatctacggtgacaacaatcggccctcaggggtccctgaccgattctctgcctccaagtccggcacctcagcctccctggccatcactgggctccaggctgaggatgaggctgattattattgtcagtcctatgacggcagcctgagtggttcggtattcggcggagggaccaagctgaccgtcctag

SEQ ID NO: 2265 - protein, 111 aa, Artificial Sequence
  Description of Artificial Sequence: Synthetic polypeptide
QSVLTQPPSVSGAPGQRVTISCTGSSSNIGANYDVHWYQQLPGTAPKLLIYGDNNRPSGVPDRFSASKSGTSASLAITGLQAEDEADYYCQSYDGSLSGSVFGGGTKLTVL

SEQ ID NO: 2266 - protein, 11 aa, Artificial Sequence
  Description of Artificial Sequence: Synthetic peptide
QSYDGSLSGSV

SEQ ID NO: 2267 - DNA, 363 bp, Artificial Sequence
  Description of Artificial Sequence: Synthetic polynucleotide
caggtgcagctggtggagtctgggggaggcgtggtccagcctgggaggtccctgagactctcctgtgcagcgtctggattcaccttcagtgactatggcatgagctgggtccgccaggctccaggcaaggggctggagtgggtggcagttatatggtatgatggaagtaatagatactatgcagactccgtgaagggccgattcaccatctccagagacaattccaagaacatgctgtatctgcaaatgagcagcctgagagccgaggacacggctgtgtattactgtgcgagagggatcagccccaactactactatgctatggacgtctggggccaagggaccacggtcaccgtctcctca

SEQ ID NO: 2268 - protein, 121 aa, Artificial Sequence
  Description of Artificial Sequence: Synthetic polypeptide
QVQLVESGGGVVQPGRSLRLSCAASGFTFSDYGMSWVRQAPGKGLEWVAVIWYDGSNRYYADSVKGRFTISRDNSKNMLYLQMSSLRAEDTAVYYCARGISPNYYYAMDVWGQGTTVTVSS

SEQ ID NO: 2269 - protein, 14 aa, Artificial Sequence
  Description of Artificial Sequence: Synthetic peptide
ARGISPNYYYAMDV

SEQ ID NO: 2270 - DNA, 337 bp, Artificial Sequence
  Description of Artificial Sequence: Synthetic polynucleotide
cagtctgtgctgactcagccgccctcagtgtctggggccccagggcagagggtcaccatctcctgcactgggagcagctccaacatcggggcaggttatgatgtacagtggtaccagcagcttccaggaacagcccccaaactcctcatctatgctaacaatattcggccctcaggggtccctgaccgattctctggctccaggtctgccacctcagcctccctggccatcactgggctccaggctgaggatgaggctgattattactgccagtcctatgacaacagcctgagtgtctcgggaatattcggcggagggaccaagctgaccgtcctag

SEQ ID NO: 2271 - protein, 112 aa, Artificial Sequence
  Description of Artificial Sequence: Synthetic polypeptide
QSVLTQPPSVSGAPGQRVTISCTGSSSNIGAGYDVQWYQQLPGTAPKLLIYANNIRPSGVPDRFSGSRSATSASLAITGLQAEDEADYYCQSYDNSLSVSGIFGGGTKLTVL

SEQ ID NO: 2272 - protein, 12 aa, Artificial Sequence
  Description of Artificial Sequence: Synthetic peptide
QSYDNSLSVSGI

SEQ ID NO: 2273 - DNA, 361 bp, Artificial Sequence
  Description of Artificial Sequence: Synthetic polynucleotide
caggtgcagctggtggagtctgggggaggcgtggtccagcctgggaggtccctgagactctcctgtgcagcctctggattcaccttcagtagctatggcatgcactgggtccgccaggctccaggcaagggtctggagtgggcggcagttatatcatatgatggaagtgataaattctatgcagactccgtgaagggccgattcaccatctccagagacaactccaagaacacgctttttctgcaaatgaacagcctgagagctgaggactcggctatctattactgtgctaagacggcgggtaacctttttggagtggttgttatctggggccagggaaccctggtcaccgtctcctcag

SEQ ID NO: 2274 - protein, 120 aa, Artificial Sequence; identical to SEQ ID NO: 61
  Description of Artificial Sequence: Synthetic polypeptide

SEQ ID NO: 2275 - protein, 13 aa, Artificial Sequence
  Description of Artificial Sequence: Synthetic peptide
AKTAGNLFGVVVI

SEQ ID NO: 2276 - DNA, 334 bp, Artificial Sequence
  Description of Artificial Sequence: Synthetic polynucleotide
cagtctgtgctgactcagtcatcctctgcctctgcttccctgggatcctcggtcaggctcacctgcactctgagtagtgggcacaagagctacatcatcgcatggcatcagcagcagccagggaaggcccctcggtacttgatgaagcttgaacctggtggaagctccaacaagggaagcggggttcctgatcgcttctcaggctccagctctggggctgaccgctacctcaccatctccaacctccagtctgaggatgaggctgattattactgtcagacctgggacattaacaccctggtgctcggcggagggaccaagctgaccgtcctag

SEQ ID NO: 2277 - protein, 111 aa, Artificial Sequence
  Description of Artificial Sequence: Synthetic polypeptide
QSVLTQSSSASASLGSSVRLTCTLSSGHKSYIIAWHQQQPGKAPRYLMKLEPGGSSNKGSGVPDRFSGSSSGADRYLTISNLQSEDEADYYCQTWDINTLVLGGGTKLTVL

SEQ ID NO: 2278 - protein, 9 aa, Artificial Sequence
  Description of Artificial Sequence: Synthetic peptide
QTWDINTLV

SEQ ID NO: 2279 - DNA, 381 bp, Artificial Sequence
  Description of Artificial Sequence: Synthetic polynucleotide
caggttcagctggtgcagtctggaactgaggtgaagaagcctggggcctcagtgagggtctcctgcaaggcttctggttacacctttaccagctatggtatcagctgggtgcgtcaggcccctggacaagggcttgagtggatggggtggatcagcgtttacactggtaacacaaactatgcacagaaggtccagggcagagtcaccttgaccacagacacatccacgagcacagtctacatggagctgaggagcctgagatctgacgacacggccgtgtattactgtgcgagggcgggggctggtataccagcaggtgggaactactactactacggtatggacgtctggggccaagggaccacggtcaccgtctcctca

SEQ ID NO: 2280 - protein, 127 aa, Artificial Sequence
  Description of Artificial Sequence: Synthetic polypeptide
QVQLVQSGTEVKKPGASVRVSCKASGYTFTSYGISWVRQAPGQGLEWMGWISVYTGNTNYAQKVQGRVTLTTDTSTSTVYMELRSLRSDDTAVYYCARAGAGIPAGGNYYYYGMDVWGQGTTVTVSS

SEQ ID NO: 2281 - protein, 20 aa, Artificial Sequence
  Description of Artificial Sequence: Synthetic peptide
ARAGAGIPAGGNYYYYGMDV

SEQ ID NO: 2282 - DNA, 331 bp, Artificial Sequence
  Description of Artificial Sequence: Synthetic polynucleotide
cagtctgtgctgactcagccgccctcagtgtctggggccccagggcagaggatcaccatctcctgcactgggagcagctccaacatcggggcaggttatgatgtacactggtaccagcagcttccaggaacagcccccaaactcctcatctatggtgacagcaatcggccctcaggggtccctgaccgattctctggctccaagtctggcacctcagcctccctggccatcactgggctccaggctgaggatgaggctgattattactgccagtcctatgacatcaccctggctgtggtattcggcggagggaccaagctgagcgtcctag

SEQ ID NO: 2283 - protein, 110 aa, Artificial Sequence
  Description of Artificial Sequence: Synthetic polypeptide
QSVLTQPPSVSGAPGQRITISCTGSSSNIGAGYDVHWYQQLPGTAPKLLIYGDSNRPSGVPDRFSGSKSGTSASLAITGLQAEDEADYYCQSYDITLAVVFGGGTKLSVL

SEQ ID NO: 2284 - protein, 10 aa, Artificial Sequence
  Description of Artificial Sequence: Synthetic peptide
QSYDITLAVV

SEQ ID NO: 2285 - DNA, 398 bp, Artificial Sequence
  Description of Artificial Sequence: Synthetic polynucleotide
gaggtgcagctggtggagtctgggggaggcctggtcaagcctggggggtccctgagactctcctgtgcagcctctggattcaccttcagtagttatagcatgaactgggtccgccaggctccagggaaggggctggagtgggtctcatccattagcagtagtagtagttacatattctacgcagactcagtgaagggccgattcaccatctccagagacaacgccaagaactcactgtctctgcaaatgaacagcctgagagccgaggacacggctgtgtattattgtgcgagagatggggagcggcagctgggggtagataaaaggagtggctggtacggttcgtactactacggtatagacgtctggggccaagggaccacggtcaccgtctcctc

SEQ ID NO: 2286 - protein, 132 aa, Artificial Sequence
  Description of Artificial Sequence: Synthetic polypeptide
EVQLVESGGGLVKPGGSLRLSCAASGFTFSSYSMNWVRQAPGKGLEWVSSISSSSSYIFYADSVKGRFTISRDNAKNSLSLQMNSLRAEDTAVYYCARDGERQLGVDKRSGWYGSYYYGIDVWGQGTTVTVS

SEQ ID NO: 2287 - protein, 26 aa, Artificial Sequence
  Description of Artificial Sequence: Synthetic peptide
ARDGERQLGVDKRSGWYGSYYYGIDV

SEQ ID NO: 2288 - DNA, 322 bp, Artificial Sequence
  Description of Artificial Sequence: Synthetic polynucleotide
tcctatgtgctgactcagccgctctcagtgtcagtggccctgggacagacggccaggattacctgtgggggaaacaacattggaggtaaaaatgtgcactggtaccagcagaagccaggccaggcccctgtgctggtcatctatagggataccaaccggccctctgggatccctgagcgattctctggctccaactcggggaacacggccaccctgaccatcagcagagcccaggccggggatgaggctgactattactgtcaggtgtgggacagcagcactgatgtggtcttcggcggagggaccaagctgaccgtcctag

SEQ ID NO: 2289 - protein, 107 aa, Artificial Sequence
  Description of Artificial Sequence: Synthetic polypeptide
SYVLTQPLSVSVALGQTARITCGGNNIGGKNVHWYQQKPGQAPVLVIYRDTNRPSGIPERFSGSNSGNTATLTISRAQAGDEADYYCQVWDSSTDVVFGGGTKLTVL

SEQ ID NO: 2290 - protein, 10 aa, Artificial Sequence
  Description of Artificial Sequence: Synthetic peptide
QVWDSSTDVV

SEQ ID NO: 2291 - DNA, 364 bp, Artificial Sequence
  Description of Artificial Sequence: Synthetic polynucleotide
caggtgcagctggtggagtctgggggaggcgtggtccagcctgggaggtccctgagactctcctgtgcagcctctggattcaccttcgttagctatggaatgcactgggtccgccaggctccaggcaaggggctggagtgggtggcggctatatcatatgatggaagtgataaacactatgcagactccgtgaagggccgattcaccatctccagagacaattccaagaacacactgtatctgcaattgaacagcctgagagttgaagacacggctgtttattactgtgcgaagggccctggaaattattatgttcgcttctttgaccactggggccagggaatcctggtcaccgtctcctcag

SEQ ID NO: 2292 - protein, 121 aa, Artificial Sequence
  Description of Artificial Sequence: Synthetic polypeptide
QVQLVESGGGVVQPGRSLRLSCAASGFTFVSYGMHWVRQAPGKGLEWVAAISYDGSDKHYADSVKGRFTISRDNSKNTLYLQLNSLRVEDTAVYYCAKGPGNYYVRFFDHWGQGILVTVSS

SEQ ID NO: 2293 - protein, 14 aa, Artificial Sequence
  Description of Artificial Sequence: Synthetic peptide
AKGPGNYYVRFFDH

SEQ ID NO: 2294 - DNA, 331 bp, Artificial Sequence
  Description of Artificial Sequence: Synthetic polynucleotide
cagtctgtgctgactcagcctgcctccgtgtctgggtctcctggacagtcgatcaccatctcctgcactggaaccagcagtgacgttggtgcttatgattatgtctcctggtaccaacaacacccaggcaaagcccccaaactcatcatttatgatgtcggtaatcggccctctgggatttctaatcgcttctctggctccaagtctggcaacacggcctccctgaccatctctgggctccagactgaggacgaggctggatattactgcagctcatctacaagcaacttcactccgctgttcggcggagggaccaagctgaccgtcctag

SEQ ID NO: 2295 - protein, 110 aa, Artificial Sequence
  Description of Artificial Sequence: Synthetic polypeptide
QSVLTQPASVSGSPGQSITISCTGTSSDVGAYDYVSWYQQHPGKAPKLIIYDVGNRPSGISNRFSGSKSGNTASLTISGLQTEDEAGYYCSSSTSNFTPLFGGGTKLTVL

SEQ ID NO: 2296 - protein, 10 aa, Artificial Sequence
  Description of Artificial Sequence: Synthetic peptide
SSSTSNFTPL

SEQ ID NO: 2297 - DNA, 378 bp, Artificial Sequence
  Description of Artificial Sequence: Synthetic polynucleotide
gaagtgcagctggtgcagtctggagcagaggtgaaaaagcccggggagtctctgcggatctcctgtaggggttctggatacacctttaccaattactggatcagctgggtgcgccagatgcccgggaaaggcctggagtggatggggaggattgatcctagtgactcttataccaagaacagtccgtccttcgaaggccacgtcagcatctcagttgacaagtccctcagcactgcctacctgcagtggagcagcctgaaggcctcggacagcgccatatattactgtgcgaggcacggggggcttgtgtatggcagttcctcagcctattacggtgtggacgtctggggccaagggaccacggtcatcgtctcctca

SEQ ID NO: 2298 - protein, 126 aa, Artificial Sequence
  Description of Artificial Sequence: Synthetic polypeptide
EVQLVQSGAEVKKPGESLRISCRGSGYTFTNYWISWVRQMPGKGLEWMGRIDPSDSYTKNSPSFEGHVSISVDKSLSTAYLQWSSLKASDSAIYYCARHGGLVYGSSSAYYGVDVWGQGTTVIVSS

SEQ ID NO: 2299 - protein, 19 aa, Artificial Sequence
  Description of Artificial Sequence: Synthetic peptide
ARHGGLVYGSSSAYYGVDV

SEQ ID NO: 2300 - DNA, 309 bp, Artificial Sequence
  Description of Artificial Sequence: Synthetic polynucleotide
  modified_base (145)..(145): a, c, t, g, unknown or other
cagactgtggtgactcaggagccctcactgactgtgtccccaggacggacagtcactctcacctgtgcttccagcattggagcagtcaccaccggttatcatccaaactggttccagcagaaacctggacaagcacccaggacantgatttatagtacaaacaacaaacactcctggacccctgcccggttctcaggctccctccttgggggcaaagctgccctgacactgtcaggtgtgcagcctgaggacgaggctgaatattactgcctgctatactctggtggtgcttgggtgttcggcggaggg

SEQ ID NO: 2301 - protein, 103 aa, Artificial Sequence
  Description of Artificial Sequence: Synthetic polypeptide
  MOD_RES (49)..(49): Any amino acid
QTVVTQEPSLTVSPGRTVTLTCASSIGAVTTGYHPNWFQQKPGQAPRTXIYSTNNKHSWTPARFSGSLLGGKAALTLSGVQPEDEAEYYCLLYSGGAWVFGGG

SEQ ID NO: 2302 - protein, 9 aa, Artificial Sequence
  Description of Artificial Sequence: Synthetic peptide
LLYSGGAWV

SEQ ID NO: 2303 - DNA, 373 bp, Artificial Sequence
  Description of Artificial Sequence: Synthetic polynucleotide
caggtgcagctggtggagtctgggggaggcgtggtccggcctgggaggtccctgagactctcctgtgcagcctctggattcacctttagtaattttgctatgcactgggtccgccaggctccaggcaaggggctggagtgggtggcacttatatcatacaatggaaacagtaaatactacgcagactccgtgaagggccgacttaccgtctccagggacaattccaagaacacgttgtatctgcaaatgaacagcctgagacctgaggacacggctgtctattactgtgtgagagaccggcgatataacaccacctggtattattactggttcgacccctggggccagggaaccctggtcaccgtctcctcag

SEQ ID NO: 2304 - protein, 124 aa, Artificial Sequence
  Description of Artificial Sequence: Synthetic polypeptide
QVQLVESGGGVVRPGRSLRLSCAASGFTFSNFAMHWVRQAPGKGLEWVALISYNGNSKYYADSVKGRLTVSRDNSKNTLYLQMNSLRPEDTAVYYCVRDRRYNTTWYYYWFDPWGQGTLVTVSS

SEQ ID NO: 2305 - protein, 17 aa, Artificial Sequence
  Description of Artificial Sequence: Synthetic peptide
VRDRRYNTTWYYYWFDP

SEQ ID NO: 2306 - DNA, 334 bp, Artificial Sequence
  Description of Artificial Sequence: Synthetic polynucleotide
aattttatgctgactcagccccactctgtgtcggagtctccggggaagacggtaagcatctcctgcacccgcagcagtggcagcattgccagcacctatgtgcagtggtaccagcagcgcccgggcagtgcccccaccactgtgatctatgaggataaacaaagaccctctggggtccctgatcggttctctggctccatcgacacctcctccaactctgcctccctcaccatctctggactgaagactgaggacgaggctgactactactgtcagtcttctgatagcggcattcagggggtgttcggcggagggaccaagctgaccgtcctag

SEQ ID NO: 2307 - protein, 111 aa, Artificial Sequence
  Description of Artificial Sequence: Synthetic polypeptide
NFMLTQPHSVSESPGKTVSISCTRSSGSIASTYVQWYQQRPGSAPTTVIYEDKQRPSGVPDRFSGSIDTSSNSASLTISGLKTEDEADYYCQSSDSGIQGVFGGGTKLTVL

SEQ ID NO: 2308 - protein, 10 aa, Artificial Sequence
  Description of Artificial Sequence: Synthetic peptide
QSSDSGIQGV

SEQ ID NO: 2309 - DNA, 356 bp, Artificial Sequence
  Description of Artificial Sequence: Synthetic polynucleotide
caggtgcagctggtgcagtctgggactggggtgaagaagcctggggcctctgtgacggtctcctgcaaggcttctggatacgccttcaccggttactatatatcgtggctgcgacaggcccctggacaagggcttgagtggatgggatggatgaaccctaatagtggtgacacaagctatgcacagaagtttcagggcagggtcaccatgaccagggacacgtccatcagcacagcctacatggagctgagtagactgacatttgacgacacggccatatattattgtgcgacttattacgacgacaatacagctctggtatattggggcctgggaacccaggtcaccgtctcctc

SEQ ID NO: 2310 - protein, 118 aa, Artificial Sequence
  Description of Artificial Sequence: Synthetic polypeptide
QVQLVQSGTGVKKPGASVTVSCKASGYAFTGYYISWLRQAPGQGLEWMGWMNPNSGDTSYAQKFQGRVTMTRDTSISTAYMELSRLTFDDTAIYYCATYYDDNTALVYWGLGTQVTVS

SEQ ID NO: 2311 - protein, 12 aa, Artificial Sequence
  Description of Artificial Sequence: Synthetic peptide
ATYYDDNTALVY

SEQ ID NO: 2312 - DNA, 324 bp, Artificial Sequence
  Description of Artificial Sequence: Synthetic polynucleotide
cagtctgtgctgactcagcctccctccgcgtccgggtctcctggacagtcagtcaccatctcctgcactggaagcagcagtgacgttggtttttttaactctgtctcctggtaccaacaacacccaggcaaggcccccaaactcatcatttatgcggtcagtaagcggccctcaggggtccctgatcgcttctctggctccaagtctggcaacacggcctccctgaccgtccttgggctccaggctgaggatgaggctgaatatttctgcagttcatatgcaggcaggcacaaattggtcttcggcggagggaccaagctgacc

SEQ ID NO: 2313 - protein, 108 aa, Artificial Sequence
  Description of Artificial Sequence: Synthetic polypeptide
QSVLTQPPSASGSPGQSVTISCTGSSSDVGFFNSVSWYQQHPGKAPKLIIYAVSKRPSGVPDRFSGSKSGNTASLTVLGLQAEDEAEYFCSSYAGRHKLVFGGGTKLT

SEQ ID NO: 2314 - protein, 10 aa, Artificial Sequence
  Description of Artificial Sequence: Synthetic peptide
SSYAGRHKLV

SEQ ID NO: 2315 - DNA, 349 bp, Artificial Sequence
  Description of Artificial Sequence: Synthetic polynucleotide
caggtgcagctgcaggagtcgggcccaggactggtgaagccttcggggaccctgtccctcagctgcgctgtctctggtggctccgtcagcagtagtcactggtggagttggctccgccagcccccagggaaggggctggagtggattggagaagtctatcatagtgggagcaccaactacaacccgtccctcaagagtcgagtcaccatatcagtagacaagtccaggaaccagttgtccctgaaggtgacgtctgtgaccgccgcggacacggccatgtatttctgtgcgagaggctcggtggtactggaccactggggccagggaagcctggttatcgtctcctcag

SEQ ID NO: 2316 - protein, 116 aa, Artificial Sequence
  Description of Artificial Sequence: Synthetic polypeptide
QVQLQESGPGLVKPSGTLSLSCAVSGGSVSSSHWWSWLRQPPGKGLEWIGEVYHSGSTNYNPSLKSRVTISVDKSRNQLSLKVTSVTAADTAMYFCARGSVVLDHWGQGSLVIVSS

SEQ ID NO: 2317 - protein, 9 aa, Artificial Sequence
  Description of Artificial Sequence: Synthetic peptide
ARGSVVLDH

SEQ ID NO: 2318 - DNA, 340 bp, Artificial Sequence
  Description of Artificial Sequence: Synthetic polynucleotide
cagtctgtgctgactcagcctgcctccgtgtctgggtctcctggacagtcgatcaccatctcctgctctggaaccagcaatgacattggttattatgactttgtctcctggtaccaacaacacccaggcaaggcccccaaactcgtgatttatgatgtcagtaatcggccctcaggggttcctaatcgcttctctggctccaagtccggcaacacggcctccctgaccatctctgggctccaggctgaggacgaggctgattatcactgcagctgcagctcatatttaagcgacaccactgtcgttatattcggcgcagggaccaagctgaccgtcctag

SEQ ID NO: 2319 - protein, 113 aa, Artificial Sequence
  Description of Artificial Sequence: Synthetic polypeptide
QSVLTQPASVSGSPGQSITISCSGTSNDIGYYDFVSWYQQHPGKAPKLVIYDVSNRPSGVPNRFSGSKSGNTASLTISGLQAEDEADYHCSCSSYLSDTTVVIFGAGTKLTVL

SEQ ID NO: 2320 - protein, 11 aa, Artificial Sequence
  Description of Artificial Sequence: Synthetic peptide
SSYLSDTTVVI

SEQ ID NO: 2321 - DNA, 358 bp, Artificial Sequence
  Description of Artificial Sequence: Synthetic polynucleotide
caggtgcagctggtgcagtctggggctgagctgaagaggcctggggcctcagtgaaggtctcctgcaaggcttctggatacaccttcaccggctactatatgcactgggtgcgacaggcccctggacaagggcttgagtggatgggacggatcaaccctaacaatggggacacaaactatgcacagaagtttcagggcagggtcaccatgaccaggggcacgtccagcagtaccttctatttggaactgagcaggctgagatctgacgacacggccgtctatttttgtgcgagagacttaggaagtgggtttttatttgagtactggggccagggaaccctggtcgccgtctcctcag

SEQ ID NO: 2322 - protein, 119 aa, Artificial Sequence
  Description of Artificial Sequence: Synthetic polypeptide
QVQLVQSGAELKRPGASVKVSCKASGYTFTGYYMHWVRQAPGQGLEWMGRINPNNGDTNYAQKFQGRVTMTRGTSSSTFYLELSRLRSDDTAVYFCARDLGSGFLFEYWGQGTLVAVSS

SEQ ID NO: 2323 - protein, 12 aa, Artificial Sequence
  Description of Artificial Sequence: Synthetic peptide
ARDLGSGFLFEY

SEQ ID NO: 2324 - DNA, 331 bp, Artificial Sequence
  Description of Artificial Sequence: Synthetic polynucleotide
  modified_base (60)..(60): a, c, t, g, unknown or other
  modified_base (100)..(100): a, c, t, g, unknown or other
  modified_base (109)..(109): a, c, t, g, unknown or other
  modified_base (207)..(207): a, c, t, g, unknown or other
cagtctgtgctgactcagcctccctccgcgtccgggtctcctggacagtcagtcaccatntcctgcactggaaccagccgtgacgttggttattataatnaagtttccnggtaccaacagtatccaggccaggcccccaaaatcataatctatgaggtcaataagcggccctcaggggtccatgatcgcttctggggctcccagtcngccaacaaggcctccctgaccgtctctgggctccaggctgaggatgaggctgattattactgcagctcatatgcaggaagcaacaatttgttactcggcggagggaccaagttgaccgtcctag

SEQ ID NO: 2325 - protein, 110 aa, Artificial Sequence
  Description of Artificial Sequence: Synthetic polypeptide
  MOD_RES (20)..(20): Any amino acid
  MOD_RES (34)..(34): Any amino acid
  MOD_RES (37)..(37): Any amino acid
QSVLTQPPSASGSPGQSVTXSCTGTSRDVGYYNXVSXYQQYPGQAPKIIIYEVNKRPSGVHDRFWGSQSANKASLTVSGLQAEDEADYYCSSYAGSNNLLLGGGTKLTVL

SEQ ID NO: 2326 - protein, 10 aa, Artificial Sequence
  Description of Artificial Sequence: Synthetic peptide
SSYAGSNNLL

SEQ ID NO: 2327 - DNA, 361 bp, Artificial Sequence
  Description of Artificial Sequence: Synthetic polynucleotide
caggtgcagctggtggagtctgggggaggcgtggtccagcctgggaggtccctgagactctcctgtgtagcctctggattcaccttcagtacctatggcatgcactgggtccgccaggctccaggcaaggggctggagtgggtggcagttatgtcatatgacggaactcttaacaagtatgcagactctgtgaagggccgcttcaccatctccagagacaattccaagaacacgctgtttctgcaaatgaacagcctgagacctgaggacacggctgtctattactgtgcgaaagtggctgggaacttcgggggtctctttgactattggggccagggaaacctggtcatcgtctcctcag

SEQ ID NO: 2328 - protein, 120 aa, Artificial Sequence
  Description of Artificial Sequence: Synthetic polypeptide
QVQLVESGGGVVQPGRSLRLSCVASGFTFSTYGMHWVRQAPGKGLEWVAVMSYDGTLNKYADSVKGRFTISRDNSKNTLFLQMNSLRPEDTAVYYCAKVAGNFGGLFDYWGQGNLVIVSS

SEQ ID NO: 2329 - protein, 13 aa, Artificial Sequence
  Description of Artificial Sequence: Synthetic peptide
AKVAGNFGGLFDY

SEQ ID NO: 2330 - DNA, 333 bp, Artificial Sequence
  Description of Artificial Sequence: Synthetic polynucleotide
cagtctgtgctgactcagtcgccctctgcctctgcctccctgggagcctcggtcaagctcacctgcactctgagcagcgggcacacctactactccatcgcatggcatcggcagcagtcagagaagggccctcggtacttgatgactctgaacagtgatggcagccacaacaggggggacgggatccctgatcgcttctcaggctccagctctgggcctgagcgctacctcaccatctccagcctccagtctgaggatgaggctgactattactgtcagacctggtaccatggcactgtgatcttcggcggagggaccaagctgaccgtccta

SEQ ID NO: 2331 - protein, 111 aa, Artificial Sequence
  Description of Artificial Sequence: Synthetic polypeptide
QSVLTQSPSASASLGASVKLTCTLSSGHTYYSIAWHRQQSEKGPRYLMTLNSDGSHNRGDGIPDRFSGSSSGPERYLTISSLQSEDEADYYCQTWYHGTVIFGGGTKLTVL

SEQ ID NO: 2332 - protein, 9 aa, Artificial Sequence
  Description of Artificial Sequence: Synthetic peptide
QTWYHGTVI

SEQ ID NO: 2333 - DNA, 358 bp, Artificial Sequence
  Description of Artificial Sequence: Synthetic polynucleotide
caggtgcagctggtgcagtctggggctgaggtgaagaagcctgggtcctcggtgaaagtctcctgcaaggcttctggaggcaccttcagcaattatgctatccactgggtgcgacaggcccctggacaaggacttgagtggatgggagggatcatccctctctttggtacaccaaactacgcacagaagttccagcgcagagtcaccattaccgcggacgaatccacgagtactgcctacatgcaactgagctccctcagatctgaagacacggccgtgtattactgtgcgagagagggaggggcatcagcctcccttgattactggggccagggaaccctggtcaccgtctcctcag

SEQ ID NO: 2334 - protein, 119 aa, Artificial Sequence
  Description of Artificial Sequence: Synthetic polypeptide
QVQLVQSGAEVKKPGSSVKVSCKASGGTFSNYAIHWVRQAPGQGLEWMGGIIPLFGTPNYAQKFQRRVTITADESTSTAYMQLSSLRSEDTAVYYCAREGGASASLDYWGQGTLVTVSS

SEQ ID NO: 2335 - protein, 12 aa, Artificial Sequence
  Description of Artificial Sequence: Synthetic peptide
AREGGASASLDY

SEQ ID NO: 2336 - DNA, 325 bp, Artificial Sequence
  Description of Artificial Sequence: Synthetic polynucleotide
tcctatgtgctgactcagccaccctcggtgtcagtggccccaggaaagacggccaggattacctgtgggggaaacaacattggaagtaaaagtgtgcactggtaccagcagaagccaggccaggcccctgtgctggtcgtctatgatgatagcgaccggccctcagggatccctgagcgattctctggctccaactctgggaacacggccaccctgaccatcagcagggtcgaagccggggatgaggccgactattactgtcaggtgtgggatagtagtagtgatcatgtggtattcggcggagggaccaagctgaccgtcctag

SEQ ID NO: 2337 - protein, 108 aa, Artificial Sequence
  Description of Artificial Sequence: Synthetic polypeptide
SYVLTQPPSVSVAPGKTARITCGGNNIGSKSVHWYQQKPGQAPVLVVYDDSDRPSGIPERFSGSNSGNTATLTISRVEAGDEADYYCQVWDSSSDHVVFGGGTKLTVL

SEQ ID NO: 2338 - protein, 11 aa, Artificial Sequence
  Description of Artificial Sequence: Synthetic peptide
QVWDSSSDHVV

SEQ ID NO: 2339 - DNA, 372 bp, Artificial Sequence
  Description of Artificial Sequence: Synthetic polynucleotide
caggtccagcttgtgcagtctggggctgaggtgaagaagcctggggcctcagtgaaggtttcctgcaaggcttctggatacaccttcagtaattatgctatgcattgggtgcgccaggcccccggacaaagtcttgagtggatgggatggatcaacgctgtcaatggtaacacaagatattcacagaagttccagggcagagtcaccattaccagggacacatccgcgagcacagcctacatggaactgagcagcctgagatctgaggacacagctgtgtattactgtgcgacctccctttacagtggtggggtctactactactacggtctagacgtctggggccaagggaccacggtcaccgtctcctca

SEQ ID NO: 2340 - protein, 124 aa, Artificial Sequence
  Description of Artificial Sequence: Synthetic polypeptide
QVQLVQSGAEVKKPGASVKVSCKASGYTFSNYAMHWVRQAPGQSLEWMGWINAVNGNTRYSQKFQGRVTITRDTSASTAYMELSSLRSEDTAVYYCATSLYSGGVYYYYGLDVWGQGTTVTVSS

SEQ ID NO: 2341 - protein, 17 aa, Artificial Sequence
  Description of Artificial Sequence: Synthetic peptide
ATSLYSGGVYYYYGLDV

SEQ ID NO: 2342 - DNA, 337 bp, Artificial Sequence
  Description of Artificial Sequence: Synthetic polynucleotide
cagtctgtgctgactcagccgccctcagtgtctggggccccagggcagacggtcaccatcacctgcactgggagcagatccaacatcggggcaggttatgatgtacactggtaccagcagcttccaggaacagcccccaaactcctcatctttgctaacaacaatcgaccctcaggggtccctgaccgattctctggctccaggtctggcacctcagcctccctggccatcactgggctccaggctgaggatgaggctgactattactgccagtcctatgacatcaacctcaatgactatgtgaaattcggcggcgggaccaagctgaccgtcctag

SEQ ID NO: 2343 - protein, 112 aa, Artificial Sequence
  Description of Artificial Sequence: Synthetic polypeptide
QSVLTQPPSVSGAPGQTVTITCTGSRSNIGAGYDVHWYQQLPGTAPKLLIFANNNRPSGVPDRFSGSRSGTSASLAITGLQAEDEADYYCQSYDINLNDYVKFGGGTKLTVL

SEQ ID NO: 2344 - protein, 12 aa, Artificial Sequence
  Description of Artificial Sequence: Synthetic peptide
QSYDINLNDYVK

SEQ ID NO: 2345 - DNA, 358 bp, Artificial Sequence
  Description of Artificial Sequence: Synthetic polynucleotide
caggtgcagctggtgcagtctggggctgaggtgaagaagcctggggcctcagtgaaggtctcctgcaaggcctctggatacaccttcaccggctactatatgcaatgggtgcgacaggcccctggacaagggctggagtggatgggatggatgaaccctaacaatggtggcacaacctatgcacagaagtttcagggcagggtcaccatgaccagggacacgtccaccagcacagcctacatggagttgagcaggctaagatctgacgacacggccgtgtatttttgtgggaggactttcggtggtccctcgcaatcagactattggggccagggaaccctggtcaccgtctcctcag

SEQ ID NO: 2346 - protein, 119 aa, Artificial Sequence
  Description of Artificial Sequence: Synthetic polypeptide
QVQLVQSGAEVKKPGASVKVSCKASGYTFTGYYMQWVRQAPGQGLEWMGWMNPNNGGTTYAQKFQGRVTMTRDTSTSTAYMELSRLRSDDTAVYFCGRTFGGPSQSDYWGQGTLVTVSS

SEQ ID NO: 2347 - protein, 12 aa, Artificial Sequence
  Description of Artificial Sequence: Synthetic peptide
GRTFGGPSQSDY

SEQ ID NO: 2348 - DNA, 330 bp, Artificial Sequence
  Description of Artificial Sequence: Synthetic polynucleotide
cagtctgccctgactcagcctccctccgcgtccgggtctcctggacagtcagtcaccatctcctgcactggaaccagcagtgacgttggtgattatgactatgtctcctggtatcaacagcacccaggcaaagcccccaaactcatggtttatgaggtcagtaagcggccctcaggggtccctgatcgcttctctggctccaagtctggcaacacggcctccctgaccgtctctgggctccaggctgaggatgaggctgaatattactgcacctcatatgcaggccgcaacaatgtggtcttcggcggagggaccaagctgaccgtccta

SEQ ID NO: 2349 - protein, 110 aa, Artificial Sequence
  Description of Artificial Sequence: Synthetic polypeptide
QSALTQPPSASGSPGQSVTISCTGTSSDVGDYDYVSWYQQHPGKAPKLMVYEVSKRPSGVPDRFSGSKSGNTASLTVSGLQAEDEAEYYCTSYAGRNNVVFGGGTKLTVL

SEQ ID NO: 2350 - protein, 10 aa, Artificial Sequence
  Description of Artificial Sequence: Synthetic peptide
TSYAGRNNVV

SEQ ID NO: 2351 - DNA, 350 bp, Artificial Sequence
  Description of Artificial Sequence: Synthetic polynucleotide
  modified_base (332)..(332): a, c, t, g, unknown or other
caggtgcagctggtgcagtctggggctgaggtgaagaagcctgggtcctcggtgaaggtctcctgcaaggcttctggaggcgccttcatcaactatgctatccactgggtgcggcaggcccctggacaagggcttgagtggatggggcggaccatccctttttttggtacatcaaactacgcacagaagttccagggcagagtcacgatcaccgcggacaaatccacgagcacagcctacatggagctgagcagcctgagatctgaggacacggccgtgtattactgtgcgagagatggtggggcggtggctggtttaaattactggggccngggaaccctggtcaccgt

SEQ ID NO: 2352 - protein, 116 aa, Artificial Sequence
  Description of Artificial Sequence: Synthetic polypeptide
  MOD_RES (111)..(111): Any amino acid
QVQLVQSGAEVKKPGSSVKVSCKASGGAFINYAIHWVRQAPGQGLEWMGRTIPFFGTSNYAQKFQGRVTITADKSTSTAYMELSSLRSEDTAVYYCARDGGAVAGLNYWGXGTLVT

SEQ ID NO: 2353 - protein, 12 aa, Artificial Sequence
  Description of Artificial Sequence: Synthetic peptide
ARDGGAVAGLNY

SEQ ID NO: 2354 - DNA, 337 bp, Artificial Sequence
  Description of Artificial Sequence: Synthetic polynucleotide
gatattgtgatgacccagactccactctctctgtccgtcacccctggacagccggcctccatctcttgtaagtctagtcacagcctcctgcatagagatggaaagacctattcgtactggtacctgcagaagccaggccagcctccacagctcctgatctatgaagtttccaaccggttatctggagtgccagacagattcagtggcagcgggtcagggacagatttcacactgaaaatcagccgggtggaggctgaggatgttggggtttattactgcatgcaaagtatacagtttccgtggacgttcggccaagggaccaaggtggaaatcaaac

SEQ ID NO: 2355 - protein, 112 aa, Artificial Sequence
  Description of Artificial Sequence: Synthetic polypeptide
DIVMTQTPLSLSVTPGQPASISCKSSHSLLHRDGKTYSYWYLQKPGQPPQLLIYEVSNRLSGVPDRFSGSGSGTDFTLKISRVEAEDVGVYYCMQSIQFPWTFGQGTKVEIK

SEQ ID NO: 2356 - protein, 9 aa, Artificial Sequence
  Description of Artificial Sequence: Synthetic peptide
MQSIQFPWT

SEQ ID NO: 2357 - DNA, 355 bp, Artificial Sequence
  Description of Artificial Sequence: Synthetic polynucleotide
caggtgcagctggtgcagtctggggctgaggtgaagaagcctgggtcctcggtgagggtctcctgcaaaatttctggaggcaacttcaacaagtatgctatcagctgggtgcgacaggcccctggacaagggcttgagtggatgggagggatcatccctatctttggtacaccaaactacgcacagaggtttcagggcagagtcaccattaccgcggacgaatccacgagcacagcctatatggagctgagtagcctgagatctgaggacacggccgtgtattattgtgcgagagatgggggggtgaccccaattgactactggggccagggaaccctggtcaccgtctcctcag

SEQ ID NO: 2358 - protein, 118 aa, Artificial Sequence
  Description of Artificial Sequence: Synthetic polypeptide
QVQLVQSGAEVKKPGSSVRVSCKISGGNFNKYAISWVRQAPGQGLEWMGGIIPIFGTPNYAQRFQGRVTITADESTSTAYMELSSLRSEDTAVYYCARDGGVTPIDYWGQGTLVTVSS

SEQ ID NO: 2359 - protein, 11 aa, Artificial Sequence
  Description of Artificial Sequence: Synthetic peptide
ARDGGVTPIDY

SEQ ID NO: 2360 - DNA, 337 bp, Artificial Sequence
  Description of Artificial Sequence: Synthetic polynucleotide
gatattgtgatgactcagtctccactctccctgcccgtcacccctggagagccggcctccatctcctgcaggtctagtcagagcctcctgcatcgtagtggatacaactatatggattggtacctgcagaagccagggcagtctccacagctcctgatctatttgggttctaatcgggcctccggggtccctgacaggttcagtggcagtggatcaggcacagattttacactgaaaatcagcagagtggaggctgaggatgttggggtttattactgcatgcaagctctacaaactccgtacacttttggccaggggaccaagctggagatcaaac

SEQ ID NO: 2361 - protein, 112 aa, Artificial Sequence
  Description of Artificial Sequence: Synthetic polypeptide
DIVMTQSPLSLPVTPGEPASISCRSSQSLLHRSGYNYMDWYLQKPGQSPQLLIYLGSNRASGVPDRFSGSGSGTDFTLKISRVEAEDVGVYYCMQALQTPYTFGQGTKLEIK

SEQ ID NO: 2362 - protein, 9 aa, Artificial Sequence
  Description of Artificial Sequence: Synthetic peptide
MQALQTPYT

SEQ ID NO: 2363 - DNA, 358 bp, Artificial Sequence
  Description of Artificial Sequence: Synthetic polynucleotide
gaggtgcagctggtggagtctgggggaggcttggtacagcctggagggtccctgagactctcctgtgtagcctctggattcagtttcagtggttatgaaatgaactgggtccgccaggctccggggaagggactggagtgggtctcatatatcagtgatagtggcagtgacacatactacgcagtctctctggggggccgtttcaccgtctccagagacaacgccaagaactcagtgtatctgcaaatgaccagcctgagagccgaggacacggctatttattactgtgcgagatcgcgagataagtacaatctctttgaccactggggccagggaaccctggtcaccgtctcctcag

SEQ ID NO: 2364 - protein, 119 aa, Artificial Sequence
  Description of Artificial Sequence: Synthetic polypeptide
EVQLVESGGGLVQPGGSLRLSCVASGFSFSGYEMNWVRQAPGKGLEWVSYISDSGSDTYYAVSLGGRFTVSRDNAKNSVYLQMTSLRAEDTAIYYCARSRDKYNLFDHWGQGTLVTVSS

SEQ ID NO: 2365 - protein, 12 aa, Artificial Sequence
  Description of Artificial Sequence: Synthetic peptide
ARSRDKYNLFDH

SEQ ID NO: 2366 - DNA, 322 bp, Artificial Sequence
  Description of Artificial Sequence: Synthetic polynucleotide
  modified_base (55)..(55): a, c, t, g, unknown or other
gacatccagatgacccagtctccttccaccctgtctgcatctgtaggagacagantcaccatcacctgccgggccagtcagtatattaagacttggttggcctggtatcagcagaaaccagggagacccccaaagctcctgatctacaaggcgtctagtttagaaactggggtcccatcaagattcagcggcagtggatctgggacacaattcactctcaccatcagcagcctgcagcctgatgattttgcaacttactactgtcaacagtataatactttttctcagatcactttcggcggagggaccaaggtagagatca

SEQ ID NO: 2367 - protein, 107 aa, Artificial Sequence
  Description of Artificial Sequence: Synthetic polypeptide
  MOD_RES (19)..(19): Any amino acid
DIQMTQSPSTLSASVGDRXTITCRASQYIKTWLAWYQQKPGRPPKLLIYKASSLETGVPSRFSGSGSGTQFTLTISSLQPDDFATYYCQQYNTFSQITFGGGTKVEI

SEQ ID NO: 2368 - protein, 10 aa, Artificial Sequence
  Description of Artificial Sequence: Synthetic peptide
QQYNTFSQIT

SEQ ID NO: 2369 - DNA, 358 bp, Artificial Sequence
  Description of Artificial Sequence: Synthetic polynucleotide
caggtgcagctggtgcagtctggggctgaggtgaagaagcctgggtcctcggtgaaagtctcctgcaagacttctggaggcatcttcagcaactatgctatcaactgggtgcggcaggcccctgggccaggacttgagtggatgggaggaatcatccctctctttggtagagcaaagtatgcacagaagttccggggcagagtcacgatcaccgcggacgaatccacgagcacagcctacatggaactgagcagcctgacgtctgaggacacggccgtgtattactgtgcgagagacgggggggcagtggttggtttttgctactggggccagggaaccctgatcaccgtctcctcag

SEQ ID NO: 2370 - protein, 119 aa, Artificial Sequence
  Description of Artificial Sequence: Synthetic polypeptide
QVQLVQSGAEVKKPGSSVKVSCKTSGGIFSNYAINWVRQAPGPGLEWMGGIIPLFGRAKYAQKFRGRVTITADESTSTAYMELSSLTSEDTAVYYCARDGGAVVGFCYWGQGTLITVSS

SEQ ID NO: 2371 - protein, 12 aa, Artificial Sequence
  Description of Artificial Sequence: Synthetic peptide
ARDGGAVVGFCY

SEQ ID NO: 2372 - DNA, 322 bp, Artificial Sequence
  Description of Artificial Sequence: Synthetic polynucleotide
gacatccagatgacccagtctccatcctccctgtctgcatctgtaggagacagagtcaccatcacttgccaggcgagtcaggacattagcaactatttgaattggtatcagcagaaaccagggaaagcccctaagctcctgatctacgatgcatccaatttggaaacgggggtcccatcaaggttcagtggaagtggatctgggacagattttactttcaccatcagcagcctgcagcctgaagatattgcaacatattactgtcaacagtatgataatctcatattcactttcggccctgggaccaaagtggatatcaaac

SEQ ID NO: 2373 - protein, 107 aa, Artificial Sequence
  Description of Artificial Sequence: Synthetic polypeptide
DIQMTQSPSSLSASVGDRVTITCQASQDISNYLNWYQQKPGKAPKLLIYDASNLETGVPSRFSGSGSGTDFTFTISSLQPEDIATYYCQQYDNLIFTFGPGTKVDIK

SEQ ID NO: 2374 - protein, 9 aa, Artificial Sequence
  Description of Artificial Sequence: Synthetic peptide
QQYDNLIFT

SEQ ID NO: 2375 - DNA, 364 bp, Artificial Sequence
  Description of Artificial Sequence: Synthetic polynucleotide
caggtgcagctggtgcagtctggggctgaggtgaagaagcctggggcctcagtgaaggtttcctgcaaggcatctggatacaccttcaccacttactatttgcactgggtgcgacaggcccctggacaagggcttgagtggatgggactaatcaaccctgttagtggtaacacaaactacgcacagaagttccaggacagagtcaccctgaccagggacatgtccacgagcacagtctacatgaaactgaccagcctgagatctgaggacacggccgtctattactgtgcgagaggccactgggactacggagagtctctctttgacctctggggccagggaaccctggtcatcgtgtcctcag

SEQ ID NO: 2376 - protein, 121 aa, Artificial Sequence
  Description of Artificial Sequence: Synthetic polypeptide
QVQLVQSGAEVKKPGASVKVSCKASGYTFTTYYLHWVRQAPGQGLEWMGLINPVSGNTNYAQKFQDRVTLTRDMSTSTVYMKLTSLRSEDTAVYYCARGHWDYGESLFDLWGQGTLVIVSS

SEQ ID NO: 2377 - protein, 14 aa, Artificial Sequence
  Description of Artificial Sequence: Synthetic peptide
ARGHWDYGESLFDL

SEQ ID NO: 2378 - DNA, 322 bp, Artificial Sequence
  Description of Artificial Sequence: Synthetic polynucleotide
gaaattgtgttgacgcagtctccaggcaccctgtctttgtctccaggggaaggagccaccctctcctgcagggccagtcagagtgttagtaattaccacttagcctggtaccagcagaaacctgaccaggctcccaggctcctcatctatggtgcttccaccagggccactggcatcccagacaggttcagtggcagtgggtctgggacagacttcactctcaccatcagcagactggagcctgaggattttgcagtgtattactgtcagcagtatgatagctcactcactttcggcggagggaccaaagtggacatcaaac

SEQ ID NO: 2379 - protein, 107 aa, Artificial Sequence
  Description of Artificial Sequence: Synthetic polypeptide
EIVLTQSPGTLSLSPGEGATLSCRASQSVSNYHLAWYQQKPDQAPRLLIYGASTRATGIPDRFSGSGSGTDFTLTISRLEPEDFAVYYCQQYDSSLTFGGGTKVDIK

SEQ ID NO: 2380 - protein, 8 aa, Artificial Sequence
  Description of Artificial Sequence: Synthetic peptide
QQYDSSLT

SEQ ID NO: 2381 - DNA, 355 bp, Artificial Sequence
  Description of Artificial Sequence: Synthetic polynucleotide
caggtgcagctggtgcagtctggggctgaggtgaagaagcctgggtcctcggtgaagatctcctgcaaggcttctggaggcaccttcagcaactttgctatcagctgggtgcgacaggcccctggacaagggcttgagtggatgggagggatcatccctctctttggtacaccaaactacgcacagaagtttcagggcagagtcacaataaccgcggacgaatccacgagcacggcccacatggacctcagtagcctgagatctgaggacacggccgtgtattactgtgcgcgagatggtggcggtggctcgcttgactactggggcaacggaaccctggtcaccgtctcctcag

SEQ ID NO: 2382 - protein, 118 aa, Artificial Sequence
  Description of Artificial Sequence: Synthetic polypeptide
QVQLVQSGAEVKKPGSSVKISCKASGGTFSNFAISWVRQAPGQGLEWMGGIIPLFGTPNYAQKFQGRVTITADESTSTAHMDLSSLRSEDTAVYYCARDGGGGSLDYWGNGTLVTVSS

SEQ ID NO: 2383 - protein, 11 aa, Artificial Sequence
  Description of Artificial Sequence: Synthetic peptide
ARDGGGGSLDY

SEQ ID NO: 2384 - DNA, 337 bp, Artificial Sequence
  Description of Artificial Sequence: Synthetic polynucleotide
gatattgtgatgactcagtctccactctccctgcccgtcacccctggagagccggcctccatctcctgcaggtctagtcagagcctcctgcataatagtggatacaactatttggattggtacctgcagaagccagggcagtctccacagctcctgatctatttgggttctaatcgggcctccggggtccctgacaggttcagtggcagtggatcaggcacagattttacactgaaaatcagtagagtggaggctgaggatgttggggtttattactgcatgcaagctctgcaaactccgctcactttcggcggagggaccaaggtggagatcaaac

SEQ ID NO: 2385 - protein, 112 aa, Artificial Sequence
  Description of Artificial Sequence: Synthetic polypeptide
DIVMTQSPLSLPVTPGEPASISCRSSQSLLHNSGYNYLDWYLQKPGQSPQLLIYLGSNRASGVPDRFSGSGSGTDFTLKISRVEAEDVGVYYCMQALQTPLTFGGGTKVEIK

SEQ ID NO: 2386 - protein, 9 aa, Artificial Sequence
  Description of Artificial Sequence: Synthetic peptide
MQALQTPLT

SEQ ID NO: 2387 - DNA, 364 bp, Artificial Sequence
  Description of Artificial Sequence: Synthetic polynucleotide
caggtgcagctggtggagtctgggggaggcgtggtccagcctgggaggtccctgagactctcctgtgcagcctctggattcaccttcagtagctatgcaatgcactgggtccgccaggctccaggcaaggggctggaatgggtggcacttatatcatatgatgcaagcactaaatactacgcagactccgtgaagggccgattcaccatctccagagacaattccaagaataccctatttctccaaatgaaaaccctgagaactgaagacacggctgtcttttactgtgcgagggccctctcgaatagtgggagctacaggcccgactcctggggcctgggaaccctggtcaccgtctcctcag

SEQ ID NO: 2388 - protein, 121 aa, Artificial Sequence
  Description of Artificial Sequence: Synthetic polypeptide
QVQLVESGGGVVQPGRSLRLSCAASGFTFSSYAMHWVRQAPGKGLEWVALISYDASTKYYADSVKGRFTISRDNSKNTLFLQMKTLRTEDTAVFYCARALSNSGSYRPDSWGLGTLVTVSS

SEQ ID NO: 2389 - protein, 14 aa, Artificial Sequence
  Description of Artificial Sequence: Synthetic peptide
ARALSNSGSYRPDS

SEQ ID NO: 2390 - DNA, 322 bp, Artificial Sequence
  Description of Artificial Sequence: Synthetic polynucleotide
gacatccagatgacccagtctccatcctccctgtctgcatctgtaggagacagagtcaccatcacttgccaggcgagtcaggacattaccaactatttaaattggtatcagcagaaaccagggaaagcccctaagctcctgatctacgatgcatccaatttggaaacaggggtcccatcaaggttcagtggaagtggatctgggacagattttactttcaccatcagcagcctgcagcctgaagatattgcaacatattactgtcaacagtatgataatctctcgtggacgttcggccaagggaccaaggtggaaatcaaac

SEQ ID NO: 2391 - protein, 107 aa, Artificial Sequence
  Description of Artificial Sequence: Synthetic polypeptide
DIQMTQSPSSLSASVGDRVTITCQASQDITNYLNWYQQKPGKAPKLLIYDASNLETGVPSRFSGSGSGTDFTFTISSLQPEDIATYYCQQYDNLSWTFGQGTKVEIK

SEQ ID NO: 2392 - protein, 9 aa, Artificial Sequence
  Description of Artificial Sequence: Synthetic peptide
QQYDNLSWT

SEQ ID NO: 2393 - DNA, 355 bp, Artificial Sequence
  Description of Artificial Sequence: Synthetic polynucleotide
caggtgcagctggtgcagtctggggctgaggtgaagaagcctgggtcctcggtgaaggtctcctgcaaggcttctggaggcaccttcagcaactatcctatcaactgggtgcgccaggcccctggacaagggcttgagtggatgggaggaatcatccccttctttggaaccccaaactacgcacagaagttccagggcagagtcacgattaccgcggacgaatccacgagcacagcctacatggagctgagcagcctgacatctgatgacacggccgtttattactgtacgagaggccacgggtccacggggggtgactactggggccagggagccctggtcattgtctcctcag

SEQ ID NO: 2394 - protein, 118 aa, Artificial Sequence
  Description of Artificial Sequence: Synthetic polypeptide
QVQLVQSGAEVKKPGSSVKVSCKASGGTFSNYPINWVRQAPGQGLEWMGGIIPFFGTPNYAQKFQGRVTITADESTSTAYMELSSLTSDDTAVYYCTRGHGSTGGDYWGQGALVIVSS

SEQ ID NO: 2395 - protein, 11 aa, Artificial Sequence
  Description of Artificial Sequence: Synthetic peptide
TRGHGSTGGDY

SEQ ID NO: 2396 - DNA, 322 bp, Artificial Sequence
  Description of Artificial Sequence: Synthetic polynucleotide
gacatccagatgacccagtctccatcctccctgtctgcgtctgtaggagacagagtcaccatcacttgccgggcgagtcaagacattagcaactatttaaattggtatcagcataaaccaggagaggcccctaaactcctgatctacgatgcatccaatttggaaacaggggtcccatcaaggttcagtggaagtggatctgggacagattttactttcaccatcaacagcctgcagcctgaagatattgcaacatatttctgtcaacaatataatactctccggtacacttttggccaggggaccaagctggagatcaaac

SEQ ID NO: 2397 - protein, 107 aa, Artificial Sequence
  Description of Artificial Sequence: Synthetic polypeptide
DIQMTQSPSSLSASVGDRVTITCRASQDISNYLNWYQHKPGEAPKLLIYDASNLETGVPSRFSGSGSGTDFTFTINSLQPEDIATYFCQQYNTLRYTFGQGTKLEIK

SEQ ID NO: 2398 - protein, 9 aa, Artificial Sequence
  Description of Artificial Sequence: Synthetic peptide
QQYNTLRYT

SEQ ID NO: 2399 - DNA, 364 bp, Artificial Sequence
  Description of Artificial Sequence: Synthetic polynucleotide
gaggtgcagctgttggagtctgggggacgcttggtactgcctggggggtccctgagactctcctgtgcagcctctattgtcagctttagtagttatgccatgacttgggtccgccaggctccagggaaggggctggagtgggtctcaagtattactggtagtggggataacacatactacgcagactccgtgaggggccggttcaccatcttcagagacaattccaagaacacgttgtatctgcaaatgaacaacctgagagccgaggacacggccatcttcttctgtgcgaagacgaaaggtaatagtggtcaccattaccctgactactggggccagggaacgttggtcaccgtctcctcag

SEQ ID NO: 2400 - protein, 121 aa, Artificial Sequence
  Description of Artificial Sequence: Synthetic polypeptide
EVQLLESGGRLVLPGGSLRLSCAASIVSFSSYAMTWVRQAPGKGLEWVSSITGSGDNTYYADSVRGRFTIFRDNSKNTLYLQMNNLRAEDTAIFFCAKTKGNSGHHYPDYWGQGTLVTVSS

SEQ ID NO: 2401 - protein, 14 aa, Artificial Sequence
  Description of Artificial Sequence: Synthetic peptide
AKTKGNSGHHYPDY

SEQ ID NO: 2402 - DNA, 322 bp, Artificial Sequence
  Description of Artificial Sequence: Synthetic polynucleotide
gacatccagttgacccagtctccatccttcctgtctgcatctgtaggagacagagtcaccatcacttgccgggccagtcagggccttagaagttatttagcctggtatcagcaaaaaccagggaaagcccctaagctcctgatctatgctgcatccactttggaaagtggggtcccatcaaggttcagcggcagtgaatctgggacagagttcactctcacaatcagcagcctgcagcctgaagattttgcaacttattactgtcaacagcttaatagttaccccctcactttcggcggagggaccaaggtggagatcaaac

SEQ ID NO: 2403 - protein, 107 aa, Artificial Sequence
  Description of Artificial Sequence: Synthetic polypeptide
DIQLTQSPSFLSASVGDRVTITCRASQGLRSYLAWYQQKPGKAPKLLIYAASTLESGVPSRFSGSESGTEFTLTISSLQPEDFATYYCQQLNSYPLTFGGGTKVEIK

SEQ ID NO: 2404 - protein, 9 aa, Artificial Sequence
  Description of Artificial Sequence: Synthetic peptide
QQLNSYPLT

SEQ ID NO: 2405 - DNA, 352 bp, Artificial Sequence
  Description of Artificial Sequence: Synthetic polynucleotide
caggtgcagctggtgcagtctggggctgaggtgaagaagcctgggtcctcggtgaaggtctcctgcaagtcttctggaggcaccttcagcaactatgccatcaactgggtgcgaggggcccctggacaaggacttgagtggatgggagggatcatccctatctttggaaaagcaaattacgcacggaagttccagggcagagtcacgatcaccgcggacgaatccacgagcacagcctacatggagctgagtagcctgagatctgacgacacggccgtgtattactgtgcgagagatgccagcagtctccttgaatactggggccagggaacccaggtcaccgtctcttcag

SEQ ID NO: 2406 - protein, 117 aa, Artificial Sequence
  Description of Artificial Sequence: Synthetic polypeptide
QVQLVQSGAEVKKPGSSVKVSCKSSGGTFSNYAINWVRGAPGQGLEWMGGIIPIFGKANYARKFQGRVTITADESTSTAYMELSSLRSDDTAVYYCARDASSLLEYWGQGTQVTVSS

SEQ ID NO: 2407 - protein, 10 aa, Artificial Sequence
  Description of Artificial Sequence: Synthetic peptide
ARDASSLLEY

SEQ ID NO: 2408 - DNA, 337 bp, Artificial Sequence
  Description of Artificial Sequence: Synthetic polynucleotide
gatgttgtgatgactcagtctccactctccctgcccgtcacccttgggcagccggcctccatttcctgcaggtctagtcaaagcctcgtatacagtgatggaaacacctacttgaattggtttcagcagaggccaggccaatctccacggcgcctaatttataaggtttctaaccgggactctggggtcccagacagattcagcggcagtgggtcaggcactgatttcacactgaaaatcagcagggtggaggctgaggatgttggggtttattactgcatgcaaggtacacactggccctacacttttggccaggggaccaagctggagatcaaac

SEQ ID NO: 2409 - protein, 112 aa, Artificial Sequence
  Description of Artificial Sequence: Synthetic polypeptide
DVVMTQSPLSLPVTLGQPASISCRSSQSLVYSDGNTYLNWFQQRPGQSPRRLIYKVSNRDSGVPDRFSGSGSGTDFTLKISRVEAEDVGVYYCMQGTHWPYTFGQGTKLEIK

SEQ ID NO: 2410 - protein, 9 aa, Artificial Sequence
  Description of Artificial Sequence: Synthetic peptide
MQGTHWPYT

SEQ ID NO: 2411 - DNA, 358 bp, Artificial Sequence
  Description of Artificial Sequence: Synthetic polynucleotide
caggtgcagctggtgcagtctggggctgaggtgaagaagcctgggtcctcggtgaaggtctcctgcaaggcttctggaggcacgttcagcaattatgctatgacttggttgcgacaggcccctggacaagggcttgaatggatgggagagatcatccctttctttcgtacaccaaaatacgcacagaagctgcagggcagactcacgattacagcggacgaatccacgagcactgtctacatggaccttaatagcctgagatctgaggacacggccgtctattactgtgcgagagatgggggggcttcagcgagttttgactactggggccagggaaccctggtcaccgtctcctcag

SEQ ID NO: 2412 - protein, 119 aa, Artificial Sequence
  Description of Artificial Sequence: Synthetic polypeptide
QVQLVQSGAEVKKPGSSVKVSCKASGGTFSNYAMTWLRQAPGQGLEWMGEIIPFFRTPKYAQKLQGRLTITADESTSTVYMDLNSLRSEDTAVYYCARDGGASASFDYWGQGTLVTVSS

SEQ ID NO: 2413 - protein, 12 aa, Artificial Sequence
  Description of Artificial Sequence: Synthetic peptide
ARDGGASASFDY

SEQ ID NO: 2414 - DNA, 337 bp, Artificial Sequence
  Description of Artificial Sequence: Synthetic polynucleotide
gatattgtgatgactcagtctccactctccctgcccgtcacccctggagagccggcctccatctcctgcaggtctagtcagagcctcctgcataggagtggatacaactatttggattggtacctgcagaagccagggcagtctccacagctcctgatctatttgggttctaatcgggcctccggggtccctgacaggttcagtggcagtggatcaggcacagattttacactgaaaatcagcaaagtggaggctgaggatgttggggtttattactgcatgcaagctctacaaactcctcggacgttcggccaagggaccaaggtggaaatcaaac

SEQ ID NO: 2415 - protein, 112 aa, Artificial Sequence
  Description of Artificial Sequence: Synthetic polypeptide
DIVMTQSPLSLPVTPGEPASISCRSSQSLLHRSGYNYLDWYLQKPGQSPQLLIYLGSNRASGVPDRFSGSGSGTDFTLKISKVEAEDVGVYYCMQALQTPRTFGQGTKVEIK

SEQ ID NO: 2416 - protein, 9 aa, Artificial Sequence
  Description of Artificial Sequence: Synthetic peptide
MQALQTPRT

SEQ ID NO: 2417 - DNA, 358 bp, Artificial Sequence
  Description of Artificial Sequence: Synthetic polynucleotide
gaggtgcagctggtggagtctgggggaggcttggtacagcctggagggtccctgagactctcctgtgtagcctctggattcaccttcagtagttatgaaatgaactgggtccgccaggctccagggaagggtctggagtgggtttcatacattagcagtggtggtaatctcgtgtactacgcaggctccgtggagggccgattcaccgtctccagagacgacgccaacaacacactgtttttgcaaatgaaccgcctgagagacgaggacacggctatttattactgtgcgagacctagaaatcactacaacctctttgactactggggccagggaaccctggtcaccgtctcctcag

SEQ ID NO: 2418 - protein, 119 aa, Artificial Sequence
  Description of Artificial Sequence: Synthetic polypeptide
EVQLVESGGGLVQPGGSLRLSCVASGFTFSSYEMNWVRQAPGKGLEWVSYISSGGNLVYYAGSVEGRFTVSRDDANNTLFLQMNRLRDEDTAIYYCARPRNHYNLFDYWGQGTLVTVSS

SEQ ID NO: 2419 - protein, 12 aa, Artificial Sequence
  Description of Artificial Sequence: Synthetic peptide
ARPRNHYNLFDY

SEQ ID NO: 2420 - DNA, 325 bp, Artificial Sequence
  Description of Artificial Sequence: Synthetic polynucleotide
gacatccagatgacccagtctccttccaccctgtctgcatctgtaggagacagagtcaccatcacttgccgggccagtgagaatattaggagctggttggcctggtatcagcagaaaccagggaaagcccctaaactcttgatctataaggcgtcttctttagaaagtggggtcccatcaaggttcagcggcagtggatctgggacagaattcactctcaccatcagcagcctgcggcctgatgactttgcaacttactactgccaacaatataatacttattccgcgctcactttcggcggagggaccaaggtggagatcaaac

SEQ ID NO: 2421 - protein, 108 aa, Artificial Sequence
  Description of Artificial Sequence: Synthetic polypeptide
DIQMTQSPSTLSASVGDRVTITCRASENIRSWLAWYQQKPGKAPKLLIYKASSLESGVPSRFSGSGSGTEFTLTISSLRPDDFATYYCQQYNTYSALTFGGGTKVEIK

SEQ ID NO: 2422 - protein, 10 aa, Artificial Sequence
  Description of Artificial Sequence: Synthetic peptide
QQYNTYSALT

SEQ ID NO: 2423 - DNA, 355 bp, Artificial Sequence
  Description of Artificial Sequence: Synthetic polynucleotide
caggtgcagctggtgcagtctggggctgaggtgaagaagcctgggtcctcggtgaaggtctcctgcaaggcttctggaggcaccttcagtaactatgctatcaattgggtgcgacaggccccgggacaaggacttgagtacatgggacgtatcatccctatctttggtacaccaaactacgcacagaagttccagggcagagtcacgattaccgcggacaagtccacgagcacagcctacatggaggtgagcagcctgagacctgaagacacggccgtgtattactgtgcgagagatggtggggcccacctctttgactactggggccagggaaccctggtcaccgtctcgtcag

SEQ ID NO: 2424 - protein, 118 aa, Artificial Sequence; identical to SEQ ID NO: 85
  Description of Artificial Sequence: Synthetic polypeptide

SEQ ID NO: 2425 - protein, 11 aa, Artificial Sequence
  Description of Artificial Sequence: Synthetic peptide
ARDGGAHLFDY

SEQ ID NO: 2426 - DNA, 337 bp, Artificial Sequence
  Description of Artificial Sequence: Synthetic polynucleotide
gatgttgtgatgactcagtctccactctccctgcccgtcacccttggacagccggcctccatctcctgcaggtctagtcaaagcctcgtacacactgatggagacatctacttgaattggtttcagcagaggccgggccaatctccaaggcgcctaatttatagggtttctaaccgggactctggggtcccagacagattcagcggcagtggatcaggcactgatttcacactgagaatcagcagggtggaggctgaagatgttggagtttattactgcatgcaaggtacacactggcctccgacgttcggccaagggaccaaggtggaactcaaac

SEQ ID NO: 2427 - protein, 112 aa, Artificial Sequence
  Description of Artificial Sequence: Synthetic polypeptide
DVVMTQSPLSLPVTLGQPASISCRSSQSLVHTDGDIYLNWFQQRPGQSPRRLIYRVSNRDSGVPDRFSGSGSGTDFTLRISRVEAEDVGVYYCMQGTHWPPTFGQGTKVELK

SEQ ID NO: 2428 - protein, 9 aa, Artificial Sequence
  Description of Artificial Sequence: Synthetic peptide
MQGTHWPPT

SEQ ID NO: 2429 - DNA, 355 bp, Artificial Sequence
  Description of Artificial Sequence: Synthetic polynucleotide
caggtgcagctggtgcagtctggggctgagatgaagaagcctgggtcctcggtgaaggtctcctgcaaggcttctggaggcaccttcaacacctttgctatcagctgggtgcggcaggcccctggacaggggcttgagtggatgggaagcatcatccctatctttcgtacaacaaactacgcacagcaattccagggcagagtcacgataaccgcggacgaatccacgagctcagcctacatggagttgagcagcctcagatctgaagacacggccgtatattattgtgcgagggggcaatggctgggttcacttgactactggggccagggaaccctggtcaccgtctcctcag

SEQ ID NO: 2430 - protein, 118 aa, Artificial Sequence
  Description of Artificial Sequence: Synthetic polypeptide
QVQLVQSGAEMKKPGSSVKVSCKASGGTFNTFAISWVRQAPGQGLEWMGSIIPIFRTTNYAQQFQGRVTITADESTSSAYMELSSLRSEDTAVYYCARGQWLGSLDYWGQGTLVTVSS

SEQ ID NO: 2431 - protein, 11 aa, Artificial Sequence
  Description of Artificial Sequence: Synthetic peptide
ARGQWLGSLDY

SEQ ID NO: 2432 - DNA, 337 bp, Artificial Sequence
  Description of Artificial Sequence: Synthetic polynucleotide
  modified_base (25)..(25): a, c, t, g, unknown or other
gatattgtgatgactcagtctccantctccctgcccgtcacccctggagagccggcctccatctcctgcaggtctagtcagagtctcctgcataggagtggagacaactatttggattggtacctgcagaagccagggcagtctccacaactcctgatctatttgacttctaatcgggcctccggggtccctgacaggttcagtggcagtggatcaggcacagattttacactgaaaatcagcagagtggaggctgaggatgttggggtttattactgcatgcaagctctacaaactcctcggacgttcggccaagggaccaaggtggaaatcaaac

SEQ ID NO: 2433 - protein, 112 aa, Artificial Sequence
  Description of Artificial Sequence: Synthetic polypeptide
  MOD_RES (9)..(9): Any amino acid
DIVMTQSPXSLPVTPGEPASISCRSSQSLLHRSGDNYLDWYLQKPGQSPQLLIYLTSNRASGVPDRFSGSGSGTDFTLKISRVEAEDVGVYYCMQALQTPRTFGQGTKVEIK

SEQ ID NO: 2434 - protein, 9 aa, Artificial Sequence
  Description of Artificial Sequence: Synthetic peptide
MQALQTPRT

SEQ ID NO: 2435 - DNA, 355 bp, Artificial Sequence
  Description of Artificial Sequence: Synthetic polynucleotide
caggtgcagctggtgcagtctggggccgaggtgaagaggcctgggtcctcggtgaaggtctcctgcaaggcttctggaggcaccttcagcaactatgctatcagctgggtgcgacaggcccctggacaagggcttgagtatatgggaggaatcatccctttctttggtacaccaaactacgcacagaagttccagggcagagtcacgattaccgcggacgaatccacgagcacagtctacatggacctgagcagcctgagatctcatgacacggccgtgtattactgcgcgagagacagcggggtggtggttatggactactggggccagggaaccctggtcaccgtctcctcag

SEQ ID NO: 2436 - protein, 118 aa, Artificial Sequence
  Description of Artificial Sequence: Synthetic polypeptide
QVQLVQSGAEVKRPGSSVKVSCKASGGTFSNYAISWVRQAPGQGLEYMGGIIPFFGTPNYAQKFQGRVTITADESTSTVYMDLSSLRSHDTAVYYCARDSGVVVMDYWGQGTLVTVSS

SEQ ID NO: 2437 - protein, 11 aa, Artificial Sequence
  Description of Artificial Sequence: Synthetic peptide
ARDSGVVVMDY

SEQ ID NO: 2438 - DNA, 337 bp, Artificial Sequence
  Description of Artificial Sequence: Synthetic polynucleotide
gatattgtgatgactcagtctccactctccctgcccgtcacccctggagagccggcctccatctcctgcaggtctcgtcagagcctcctgcatagtgatggatacaactatttgaattggtacctgcagaagccagggcagtctccacagctcctgatctatttgggttctaatcgggcctccggggtccctgacaggttcagtggcagtggatcaggcacagattttacactgaaaatcagcagagtggaggctgaggatgttggggtttattactgcatgcaagctctgcgaactccattcactttcggccctgggaccaaagtggatatcaaac

SEQ ID NO: 2439 - protein, 112 aa, Artificial Sequence
  Description of Artificial Sequence: Synthetic polypeptide
DIVMTQSPLSLPVTPGEPASISCRSRQSLLHSDGYNYLNWYLQKPGQSPQLLIYLGSNRASGVPDRFSGSGSGTDFTLKISRVEAEDVGVYYCMQALRTPFTFGPGTKVDIK

SEQ ID NO: 2440 - protein, 9 aa, Artificial Sequence
  Description of Artificial Sequence: Synthetic peptide
MQALRTPFT

SEQ ID NO: 2441 - DNA, 361 bp, Artificial Sequence
  Description of Artificial Sequence: Synthetic polynucleotide
caggtgcagctggtgcagtctggggctgaggtgaagaagcctgggtcctcggtgaaggtctcctgcaaggcttctggaggcgccttcagcaactttggtttcagctgggtgcgacaggcccctggacaagggcttgagtggttggggatgatcatccctgcctttggttcaccaatctacgcacagaagttccggggcagagtcaccattagtgcggacgaatccatcagtacagcctacatggaactgagaaacctgaagtctgaggacacgggcgtctatttctgtgcgagagagggtgggggaatagggcccagcttggactactggggccagggaaccctggtcgccgtctcctcag

SEQ ID NO: 2442 - protein, 120 aa, Artificial Sequence
  Description of Artificial Sequence: Synthetic polypeptide
QVQLVQSGAEVKKPGSSVKVSCKASGGAFSNFGFSWVRQAPGQGLEWLGMIIPAFGSPIYAQKFRGRVTISADESISTAYMELRNLKSEDTGVYFCAREGGGIGPSLDYWGQGTLVAVSS

SEQ ID NO: 2443 - protein, 13 aa, Artificial Sequence
  Description of Artificial Sequence: Synthetic peptide
AREGGGIGPSLDY

SEQ ID NO: 2444 - DNA, 337 bp, Artificial Sequence
  Description of Artificial Sequence: Synthetic polynucleotide
gatattgtgatgactcagtctccactctccctgcccgtcacccctggagagccggcctccatctcctgcaggtctagtcagagcctcctgcatagttctggcgacaactatctggattggtacctgcagaagccagggcagtctccacaattgctgatctatttgggctctaatcgggcccccggggtccctgaccggttcagtggcagtggatcaggcacagattttacactgaaaatcagtagagttgaggctgaggatgttggggtttattactgcatgcaagctctacaaactcctcggacttttggccaggggaccaaactggagatcaaac

SEQ ID NO: 2445 - protein, 112 aa, Artificial Sequence
  Description of Artificial Sequence: Synthetic polypeptide
DIVMTQSPLSLPVTPGEPASISCRSSQSLLHSSGDNYLDWYLQKPGQSPQLLIYLGSNRAPGVPDRFSGSGSGTDFTLKISRVEAEDVGVYYCMQALQTPRTFGQGTKLEIK

SEQ ID NO: 2446 - protein, 9 aa, Artificial Sequence
  Description of Artificial Sequence: Synthetic peptide
MQALQTPRT

SEQ ID NO: 2447 - DNA, 358 bp, Artificial Sequence
  Description of Artificial Sequence: Synthetic polynucleotide
caggtgcagctggtgcagtctggggctgaggtgaagaagcctgggtcctcggtgaaggtctcctgcaagacttctggaggcagcttcaacaactatgctgtcaactgggtgcgacaggcccctggacaagggcttgagtggatgggagggatcatccctacctttggtacagcagactacccacagaagttccagggcagagtcaccattaccgcggacaaatccacgagcaccgcctacatggaactgaacagcctgaaatatgaagacacggccatgtatttctgtgcgagggcgtcgggaggttcagggagccttgactactggggccagggatccctggtcaccgtctcctcag

SEQ ID NO: 2448 - protein, 119 aa, Artificial Sequence
  Description of Artificial Sequence: Synthetic polypeptide
QVQLVQSGAEVKKPGSSVKVSCKTSGGSFNNYAVNWVRQAPGQGLEWMGGIIPTFGTADYPQKFQGRVTITADKSTSTAYMELNSLKYEDTAMYFCARASGGSGSLDYWGQGSLVTVSS

SEQ ID NO: 2449 - protein, 12 aa, Artificial Sequence
  Description of Artificial Sequence: Synthetic peptide
ARASGGSGSLDY

SEQ ID NO: 2450 - DNA, 337 bp, Artificial Sequence
  Description of Artificial Sequence: Synthetic polynucleotide
gatattgtgatgactcagtctccactctccctgcccgtcacccctggagagccggcctccatctcctgcaggtctagtcagagcctccttcatagaaatggatataactatttggattggttcctgcagaagccagggaagcctccacaggtcctgatctatttgggttctaatcgggcctccggggtccctgacaggttcagtgccagtggatcaggcacagactttacactgaaaatcagcagagtggaggctgaagatgttggggtttattactgcatgcaagttctgcaatctccgctcactttcggcggagggaccaaggtggagatcaaac

SEQ ID NO: 2451 - protein, 112 aa, Artificial Sequence
  Description of Artificial Sequence: Synthetic polypeptide
DIVMTQSPLSLPVTPGEPASISCRSSQSLLHRNGYNYLDWFLQKPGKPPQVLIYLGSNRASGVPDRFSASGSGTDFTLKISRVEAEDVGVYYCMQVLQSPLTFGGGTKVEIK

SEQ ID NO: 2452 - protein, 9 aa, Artificial Sequence
  Description of Artificial Sequence: Synthetic peptide
MQVLQSPLT

SEQ ID NO: 2453 - DNA, 352 bp, Artificial Sequence
  Description of Artificial Sequence: Synthetic polynucleotide
caggtgcagctggtgcagtctggggctgaggtgaagaagcctgggtcctcggtgagggtctcctgtaaggtttctggaggcaccttcagcacgtacgctatcagctgggtgcgacaggcccctggacaagggattgagtggatgggacggatcatccctatatttggtacagcaaactacgcacagaaattccagggcagagtcacgattaccgcggacggatccacgagtacagcctacatggaactgagcagcctgagatctgacgacacggccgtgtattactgtgcgagagacagtgttacgatgctagaggactggggccagggaaccctggtcaccgtctcctcag

SEQ ID NO: 2454 - protein, 117 aa, Artificial Sequence
  Description of Artificial Sequence: Synthetic polypeptide
QVQLVQSGAEVKKPGSSVRVSCKVSGGTFSTYAISWVRQAPGQGIEWMGRIIPIFGTANYAQKFQGRVTITADGSTSTAYMELSSLRSDDTAVYYCARDSVTMLEDWGQGTLVTVSS

SEQ ID NO: 2455 - protein, 10 aa, Artificial Sequence
  Description of Artificial Sequence: Synthetic peptide
ARDSVTMLED

SEQ ID NO: 2456 - DNA, 337 bp, Artificial Sequence
  Description of Artificial Sequence: Synthetic polynucleotide
gatattgtgatgactcagtctccactctccctgcccgtcacccctggagagccggcctccatctcctgcaggtctagtcagagcctcctgagtagtaatggatataactatgtggattggtacctgcagaagccagggcaggctccacagctcgtgatctatttggcttctaatcgggcctccggggtccctgacaggttcagtggcagtggatcaggcacagattttgcactgaaaatcagcagagtggaggctgaggatgttggggtttattattgcatgcaagctctacaaactcctccgacgttcggccaagggaccagggtggaaatcaaac

SEQ ID NO: 2457 - protein, 112 aa, Artificial Sequence
  Description of Artificial Sequence: Synthetic polypeptide
DIVMTQSPLSLPVTPGEPASISCRSSQSLLSSNGYNYVDWYLQKPGQAPQLVIYLASNRASGVPDRFSGSGSGTDFALKISRVEAEDVGVYYCMQALQTPPTFGQGTRVEIK

SEQ ID NO: 2458 - protein, 9 aa, Artificial Sequence
  Description of Artificial Sequence: Synthetic peptide
MQALQTPPT

SEQ ID NO: 2459 - DNA, 355 bp, Artificial Sequence
  Description of Artificial Sequence: Synthetic polynucleotide
caggtgcagctggtgcagtctggggctgaggtgaagaagcctgggtcctcggtgaaggtctcctgcaagacttctggaggctccttcaacaactatgctatcagctgggtgcgacaggcccctggacaagggcttgagtggatgggagagatcatccctatctttaatacaccaaactacgtacagaagttccggggcagagtcacgattaccgcggacaaatccacgcgcacagcctacatggagttgagcagcctgacatctgaggacacggccatatattactgtgcgagagatggtggtagtgagctacttgactactggggccagggaaccctggtcaccgtctcctcag

SEQ ID NO: 2460 - protein, 118 aa, Artificial Sequence
  Description of Artificial Sequence: Synthetic polypeptide
QVQLVQSGAEVKKPGSSVKVSCKTSGGSFNNYAISWVRQAPGQGLEWMGEIIPIFNTPNYVQKFRGRVTITADKSTRTAYMELSSLTSEDTAIYYCARDGGSELLDYWGQGTLVTVSS

SEQ ID NO: 2461 - protein, 11 aa, Artificial Sequence
  Description of Artificial Sequence: Synthetic peptide
ARDGGSELLDY

SEQ ID NO: 2462 - DNA, 337 bp, Artificial Sequence
  Description of Artificial Sequence: Synthetic polynucleotide
  modified_base (25)..(30): a, c, t, g, unknown or other
gatgttgtgatgactcagtctccannnnnnctgcccgtcacccttggacagccggcctccatctcctgcaggtctagtcaaagcctcctgtacagtgatggaaacacctacttgaattggtttcagcagaggccaggccaatctccaaggcgcctaatttataaggtttctaaccgggactctggggtcccagacagattcagcggcagtgggtcaggcactgatttcacactgagaatcagcagggtggaggctgaggatgttggggtttattactgcatgcaaggtacacactggcctcgaacgttcggccaagggaccaaggtggaaatcaaac

SEQ ID NO: 2463 - protein, 112 aa, Artificial Sequence
  Description of Artificial Sequence: Synthetic polypeptide
  MOD_RES (9)..(10): Any amino acid
DVVMTQSPXXLPVTLGQPASISCRSSQSLLYSDGNTYLNWFQQRPGQSPRRLIYKVSNRDSGVPDRFSGSGSGTDFTLRISRVEAEDVGVYYCMQGTHWPRTFGQGTKVEIK

SEQ ID NO: 2464 - protein, 9 aa, Artificial Sequence
  Description of Artificial Sequence: Synthetic peptide
MQGTHWPRT

SEQ ID NO: 2465 - DNA, 387 bp, Artificial Sequence
  Description of Artificial Sequence: Synthetic polynucleotide
caggtgcagctggtgcagtctggggctgaggtgaagaagcctgggtcctcggtgaaggtctcctgcaaggcttctgggggcaccttcagcaattatgctatcaactgggtgcgacaggcccctggaaaagggcttgagtggatgggagggaacatccctatgtttgggacaataagtaacacacagaagttccaggacagagtcacaattaccacggacgaatccacggacacagcctacatggagttgagcagcctgagatctgaggacacggccgtgtattactgtgcgagagtcaggggtaacgatttttggagtggtttcccagactacttctactacggcatggacgtctggggccaagggaccacggtcaccgtctcctca

SEQ ID NO: 2466 - protein, 129 aa, Artificial Sequence
  Description of Artificial Sequence: Synthetic polypeptide
QVQLVQSGAEVKKPGSSVKVSCKASGGTFSNYAINWVRQAPGKGLEWMGGNIPMFGTISNTQKFQDRVTITTDESTDTAYMELSSLRSEDTAVYYCARVRGNDFWSGFPDYFYYGMDVWGQGTTVTVSS

SEQ ID NO: 2467 - protein, 22 aa, Artificial Sequence
  Description of Artificial Sequence: Synthetic peptide
ARVRGNDFWSGFPDYFYYGMDV

SEQ ID NO: 2468 - DNA, 331 bp, Artificial Sequence
  Description of Artificial Sequence: Synthetic polynucleotide
gaaattgtgttgacgcagtctccaggcaccctgtctttgtctccagggcaaagagccaccctctcctgcagggccagtcagagttttaacagcgactacttagcctggtatcagcagaaacctggccaggctcccaggctcctcatctatgctgcatccagcagggccactggcatcccagacaggtttagtggcagtgggtctggaacagacttcactctcaccatcagcagactggagcctgaagattttgcagtgtattactgtcagcactatggtagcccacctcccatgtacacttttggccaggggaccaagcttgagatcaaac

SEQ ID NO: 2469 - protein, 110 aa, Artificial Sequence
  Description of Artificial Sequence: Synthetic polypeptide
EIVLTQSPGTLSLSPGQRATLSCRASQSFNSDYLAWYQQKPGQAPRLLIYAASSRATGIPDRFSGSGSGTDFTLTISRLEPEDFAVYYCQHYGSPPPMYTFGQGTKLEIK

SEQ ID NO: 2470 - protein, 11 aa, Artificial Sequence
  Description of Artificial Sequence: Synthetic peptide
QHYGSPPPMYT

SEQ ID NO: 2471 - DNA, 364 bp, Artificial Sequence
  Description of Artificial Sequence: Synthetic polynucleotide
caggtgcagctggtggagtctgggggaggcgtggtccagcctgggaggtccctgagactctcctgtgcagcctctggattctcccttggaaagtatgccatacactgggtccgccagcctccaggcaaggggctggagtgggtggcagttatatcagatgatggaagcaatatcgaatatggaggctccgtgaagggccggttcaacatttacagagacaatttcaagaacacgatatatttgcaaatgaacagcctgagacctgacgacacggctgtgtattactgtgcgagagacggcagtggctgggtagacaattggttcgacccctggggccagggaaccctggtcatcgtctcctcag

SEQ ID NO: 2472 - protein, 121 aa, Artificial Sequence
  Description of Artificial Sequence: Synthetic polypeptide
QVQLVESGGGVVQPGRSLRLSCAASGFSLGKYAIHWVRQPPGKGLEWVAVISDDGSNIEYGGSVKGRFNIYRDNFKNTIYLQMNSLRPDDTAVYYCARDGSGWVDNWFDPWGQGTLVIVSS

SEQ ID NO: 2473 - protein, 14 aa, Artificial Sequence
  Description of Artificial Sequence: Synthetic peptide
ARDGSGWVDNWFDP

SEQ ID NO: 2474 - DNA, 322 bp, Artificial Sequence
  Description of Artificial Sequence: Synthetic polynucleotide
gaaatagtgatgacgcagtctccagccaccctgtctgtgtctccaggggaaagagccaccctctcctgcagggccagtcggagtgttaacagcaacctagcctggtaccagcagaagcctgggcagcctcccagactcctcatctacggtgcatccaccagggccactggtatctcagccaggttcagtggcagtgggtctgggacagagttcactgtcaccatcagcagcctgcagtctgaagattttgcgatttattactgtcagcaatatgattactggcccctcactttcggcggagggaccaaggtagagatcaaac

SEQ ID NO: 2475 - protein, 107 aa, Artificial Sequence
  Description of Artificial Sequence: Synthetic polypeptide
EIVMTQSPATLSVSPGERATLSCRASRSVNSNLAWYQQKPGQPPRLLIYGASTRATGISARFSGSGSGTEFTVTISSLQSEDFAIYYCQQYDYWPLTFGGGTKVEIK

SEQ ID NO: 2476 - protein, 9 aa, Artificial Sequence
  Description of Artificial Sequence: Synthetic peptide
QQYDYWPLT

SEQ ID NO: 2477 - DNA, 355 bp, Artificial Sequence
  Description of Artificial Sequence: Synthetic polynucleotide
caggtgcagctggtgcagtctggggctgaggtgaagaagcctgggtcctcggtgaaggtctcctgcaaggcttctggaggcaccttcagcaactttgccatcagctgggtgcgacaggcccctggacaagggcttgagtggatgggagagatcatccctgcctttattacagcaacctacgcacaaaagttccagggcaaagtcacgatcaccgctgacaaatccacgaccacagtctacatggagctgagcagcctgagatttgaggacacggccatatattactgtgctcgaatagggggactggggagttttgactactggggccagggaaccctggtcaccgtctcctcag

SEQ ID NO: 2478 - protein, 118 aa, Artificial Sequence
  Description of Artificial Sequence: Synthetic polypeptide
QVQLVQSGAEVKKPGSSVKVSCKASGGTFSNFAISWVRQAPGQGLEWMGEIIPAFITATYAQKFQGKVTITADKSTTTVYMELSSLRFEDTAIYYCARIGGLGSFDYWGQGTLVTVSS

SEQ ID NO: 2479 - protein, 11 aa, Artificial Sequence
  Description of Artificial Sequence: Synthetic peptide
ARIGGLGSFDY

SEQ ID NO: 2480 - DNA, 337 bp, Artificial Sequence
  Description of Artificial Sequence: Synthetic polynucleotide
gatattgtgatgactcagtctccactctccctgcccgtcacccctggagagccggcctccatctcctgcaggtctagtcagagcctcctgcatagaactggatacaattatttggattggtacctgcagaagccaggacagtctccacaactcctgatctatttgggttctaatcgggcctccggggtccctgacaggttcagtggcagtggatcaggcacagattttacactgaaaatcagcagagtggaggctgaggatgttggggtttactactgcatgcaagctctacaaactcctcgcacttttggccaggggaccaaactggagatcaaac

SEQ ID NO: 2481 - protein, 112 aa, Artificial Sequence
  Description of Artificial Sequence: Synthetic polypeptide
DIVMTQSPLSLPVTPGEPASISCRSSQSLLHRTGYNYLDWYLQKPGQSPQLLIYLGSNRASGVPDRFSGSGSGTDFTLKISRVEAEDVGVYYCMQALQTPRTFGQGTKLEIK

SEQ ID NO: 2482 - protein, 9 aa, Artificial Sequence
  Description of Artificial Sequence: Synthetic peptide
MQALQTPRT

SEQ ID NO: 2483 - DNA, 358 bp, Artificial Sequence
  Description of Artificial Sequence: Synthetic polynucleotide
caggtgcagctggtgcagtctggggctgaggtgaagaagcctgggtcctcggtgaaggtctcctgcaagacttctgggggcaccttcaacacctatactatcacctggctgcgacaggcccctggacaagggcttgagtggatgggagggatcatccctatctttggtactgcaaactacgcacagaagttccagggcagagtcacgattaccgcggacgaatcctcgagtacagcctacatggaactgagcagcctgagatctgaggacacggccgtctattactgtgcgagagatgacgggggtgggagctactcggcctactggggccagggaaccctggtcaccgtctcctcag

SEQ ID NO: 2484 - protein, 119 aa, Artificial Sequence; identical to SEQ ID NO: 49
  Description of Artificial Sequence: Synthetic polypeptide

SEQ ID NO: 2485 - protein, 12 aa, Artificial Sequence
  Description of Artificial Sequence: Synthetic peptide
ARDDGGGSYSAY

SEQ ID NO: 2486 - DNA, 337 bp, Artificial Sequence
  Description of Artificial Sequence: Synthetic polynucleotide
gatattgtgatgacccagactccactctctctgtccgtcacccctggacagccggcctccatctcctgcaagtctagtcagagcctcctgcatcgtgatggaaagacgtatttgcattggcacctgcagaggccaggccagcctccacagcccctgatctatgaagtttccaaccggttctctggagtgccagataggttcagtggcagcgggtcagggacacatttcacactgagaatcagccgggtggaggctgaggatgttggggtttattactgcatgcaaagtatacagcttccgctcactttcggcggagggaccaaggtggagattaaac

SEQ ID NO: 2487 - protein, 112 aa, Artificial Sequence; identical to SEQ ID NO: 50
  Description of Artificial Sequence: Synthetic polypeptide

SEQ ID NO: 2488 - protein, 9 aa, Artificial Sequence
  Description of Artificial Sequence: Synthetic peptide
MQSIQLPLT

SEQ ID NO: 2489 - DNA, 376 bp, Artificial Sequence
  Description of Artificial Sequence: Synthetic polynucleotide
gaagtgcagctggtgcagtccggagcagaggtgaaaaagcccggggagtctctgactatctcctgtaagggttcatacacctttgccagctactggatcaactgggtgcgccagatgcccgggaaaggcctggagtggatggggaggattgatcctgatgactcttataccaattacaacccgtccttccgaggccacgtcaccatctcggttgacaagtccatcaaaactgccttcttgcagtggagcagcctgaaggcctcggacaccgccatttattactgtgcggccgacggggactgtgctagaggcaggtgctatgccgaaggctggttcgacccctggggccaaggaaccccagtcatcgtctcctcag

SEQ ID NO: 2490 - protein, 125 aa, Artificial Sequence
  Description of Artificial Sequence: Synthetic polypeptide
EVQLVQSGAEVKKPGESLTISCKGSYTFASYWINWVRQMPGKGLEWMGRIDPDDSYTNYNPSFRGHVTISVDKSIKTAFLQWSSLKASDTAIYYCAADGDCARGRCYAEGWFDPWGQGTPVIVSS

SEQ ID NO: 2491 - protein, 19 aa, Artificial Sequence
  Description of Artificial Sequence: Synthetic peptide
AADGDCARGRCYAEGWFDP

SEQ ID NO: 2492 - DNA, 322 bp, Artificial Sequence
  Description of Artificial Sequence: Synthetic polynucleotide
gaaattgtgttgacacagtctccagccaccctgtctttgtctccaggggaaagagccaccctctcctgcagggccagtcagagtgttaccaactacttagcctggtaccaacagaaacctggccaggctcccaggctcctcatgtatgatgcatccaacagggccactggcatcccagccaggttcagtggcagtgggtctgggacagacttcactctcaccatcagcagcctcgagcctgaagatcttgcagtttattactgtcagcagcgttacaattggccgctcactttcggcggagggaccaaggtggagatcaaac

SEQ ID NO: 2493 - protein, 107 aa, Artificial Sequence
  Description of Artificial Sequence: Synthetic polypeptide
EIVLTQSPATLSLSPGERATLSCRASQSVTNYLAWYQQKPGQAPRLLMYDASNRATGIPARFSGSGSGTDFTLTISSLEPEDLAVYYCQQRYNWPLTFGGGTKVEIK

SEQ ID NO: 2494 - protein, 9 aa, Artificial Sequence
  Description of Artificial Sequence: Synthetic peptide
QQRYNWPLT

SEQ ID NO: 2495 - DNA, 352 bp, Artificial Sequence
  Description of Artificial Sequence: Synthetic polynucleotide
caggtgcagctggtgcagtctggggctgaggtgaagaagcctgggtcctcggtgaaggtctcctgcaaggcatctggaggcaccttcagaaataatgctatcagctgggtgcgacaggcccctggacaagggctcgaatggatgggaggaatcatccctatctttaatacaccaaactacgcacagaggtttcagggcagagtcacgattaccgcggacatatccacgagcacagcctacatggaacttaacagcctgagatctgacgacacggccgtgtattactgtgcgagtggggcctacggaccatgggactactggggccagggaaccctggtcaccgtctcctcag

SEQ ID NO: 2496 - protein, 117 aa, Artificial Sequence
  Description of Artificial Sequence: Synthetic polypeptide
QVQLVQSGAEVKKPGSSVKVSCKASGGTFRNNAISWVRQAPGQGLEWMGGIIPIFNTPNYAQRFQGRVTITADISTSTAYMELNSLRSDDTAVYYCASGAYGPWDYWGQGTLVTVSS

SEQ ID NO: 2497 - protein, 10 aa, Artificial Sequence
  Description of Artificial Sequence: Synthetic peptide
ASGAYGPWDY

SEQ ID NO: 2498 - DNA, 322 bp, Artificial Sequence
  Description of Artificial Sequence: Synthetic polynucleotide
gacatccagatgacccagtctccatcctccctgtctgcatctattggcgacagggtcaccatcacttgccaggcgagtcaggacattaaaaactatttaaattggtttcagcagaaaccagggaaagcccctaagctcctgatctacgatgcttccaatttggaaacaggggtcccatcaaggttcagtggaagtggatctgggacagattttactttcattatcagcagcctacagcctgaagatattgcaacatattactgtcaacattatggtaatctcttcggggttttcggccctgggaccaaagtggatatcaaac

SEQ ID NO: 2499 - protein, 107 aa, Artificial Sequence
  Description of Artificial Sequence: Synthetic polypeptide
DIQMTQSPSSLSASIGDRVTITCQASQDIKNYLNWFQQKPGKAPKLLIYDASNLETGVPSRFSGSGSGTDFTFIISSLQPEDIATYYCQHYGNLFGVFGPGTKVDIK

SEQ ID NO: 2500 - protein, 9 aa, Artificial Sequence
  Description of Artificial Sequence: Synthetic peptide
QHYGNLFGV

SEQ ID NO: 2501 - DNA, 358 bp, Artificial Sequence
  Description of Artificial Sequence: Synthetic polynucleotide
caggtgcagctggtgcagtctggggctgaggtgaggaggcctgggtcctcggtgaaggtttcctgcaaggcgtttggaggcattttcggccaccatgctatcaactgggtgcgacaggcccctggacaagggcttgagtggatgggagggctcatccctgtctttggtacaccacactacgcacagaaattccagggcagagtcacgattaccgcggacgagtccacgagcacagcctacatggaactgagcagcctgaaatccgatgacacggccgtttattactgtgcgagaggggggggggcagtggctggtttgtgttactggggccagggaaccctggtcaccgtctcctcag

SEQ ID NO: 2502 - protein, 119 aa, Artificial Sequence
  Description of Artificial Sequence: Synthetic polypeptide
QVQLVQSGAEVRRPGSSVKVSCKAFGGIFGHHAINWVRQAPGQGLEWMGGLIPVFGTPHYAQKFQGRVTITADESTSTAYMELSSLKSDDTAVYYCARGGGAVAGLCYWGQGTLVTVSS

SEQ ID NO: 2503 - protein, 12 aa, Artificial Sequence
  Description of Artificial Sequence: Synthetic peptide
ARGGGAVAGLCY

SEQ ID NO: 2504 - DNA, 322 bp, Artificial Sequence
  Description of Artificial Sequence: Synthetic polynucleotide
gacatccagatgacccagtctccatcctccctgtctgcatctgtaggagacagagtcaccatcacttgccaggcgagtcaggacataagaaattatttaaattggtatcagcagaaaccagggaaagcccctaagctcctgatttacgatgcatccaatttggaaacaggggtcccatcaaggttcagtggaagtggatctgggacagattttactttcaccatcagcagcctgcagcctgaagatattgcaacatattactgtcaacagtatgatagttttcttgccactttcggcggagggaccagggtggagatcaaac

SEQ ID NO: 2505 - protein, 107 aa, Artificial Sequence
  Description of Artificial Sequence: Synthetic polypeptide
DIQMTQSPSSLSASVGDRVTITCQASQDIRNYLNWYQQKPGKAPKLLIYDASNLETGVPSRFSGSGSGTDFTFTISSLQPEDIATYYCQQYDSFLATFGGGTRVEIK

SEQ ID NO: 2506 - protein, 9 aa, Artificial Sequence
  Description of Artificial Sequence: Synthetic peptide
QQYDSFLAT

SEQ ID NO: 2507 - DNA, 349 bp, Artificial Sequence
  Description of Artificial Sequence: Synthetic polynucleotide
  modified_base (41)..(41): a, c, t, g, unknown or other
caggtgcagctggtgcagtctgggaatgaggtgaagaagcntgggtcttcggtgaaggtctcctgcaaggctactggaggcaccttcaacagttatagtatcacaagggtgcgatgggcccctggacaaggggaagagtggatgggagggatcatccctatttttggaacaccaagctacgcacagaagttccagggcagagtcacgataaccgcggacgaatgtaagaacccagccttcatggaactgaccagcctgagatttgaggacacggccatatatttctgtgcgagaaacaactggggtttcgacccctggggccagggaaccctggtcaccgtctcctcag

SEQ ID NO: 2508 - protein, 116 aa, Artificial Sequence
  Description of Artificial Sequence: Synthetic polypeptide
  MOD_RES (14)..(14): Any amino acid
QVQLVQSGNEVKKXGSSVKVSCKATGGTFNSYSITRVRWAPGQGEEWMGGIIPIFGTPSYAQKFQGRVTITADECKNPAFMELTSLRFEDTAIYFCARNNWGFDPWGQGTLVTVSS

SEQ ID NO: 2509 - protein, 9 aa, Artificial Sequence
  Description of Artificial Sequence: Synthetic peptide
ARNNWGFDP

SEQ ID NO: 2510 - DNA, 322 bp, Artificial Sequence
  Description of Artificial Sequence: Synthetic polynucleotide
gaaattgtgttgacgcagtctccaggcaccctgtctttgtctccaggggaaagagccatcctctcctgcagggccagtcagagtgttagtatcgactacctagcctggtaccagcagaaacctggccaggctcccaggctcctcatctacggtacatccaccagggccactggcatcccagacaggttcagtggcagtgggtctgggacagacttcaccctcaccatcagcagactggagcctgaagattttgcagtgtattactgtcagcagtctggtacctcaccgtacacttttggccaggggactaaggtggagatca

SEQ ID NO: 2511 - protein, 107 aa, Artificial Sequence
  Description of Artificial Sequence: Synthetic polypeptide
EIVLTQSPGTLSLSPGERAILSCRASQSVSIDYLAWYQQKPGQAPRLLIYGTSTRATGIPDRFSGSGSGTDFTLTISRLEPEDFAVYYCQQSGTSPYTFGQGTKVEI

SEQ ID NO: 2512 - protein, 9 aa, Artificial Sequence
  Description of Artificial Sequence: Synthetic peptide
QQSGTSPYT

SEQ ID NO: 2513 - DNA, 355 bp, Artificial Sequence
  Description of Artificial Sequence: Synthetic polynucleotide
caggtgcagctggtgcagtctggggctgaggtgaagaagcctgggtcctcggtgaaggtctcctgcaaggcttctggaggcacgttcaataattatgctatcatctgggtgcgacaggcccctggacaagggcttgaatggatgggagggatcctccctgtcttcgggacaacaaactacacacagaatcttcagggcagagtcaagatcaccgcggacgaatccacgagtacagcctacatggagttgagcaggctaaaatatgaggacacggccgtgtattactgtgcgagagatagtggcaccgcctcgtttgactactggggccagggaaccctggtcatcgtctcctcag

SEQ ID NO: 2514 - protein, 118 aa, Artificial Sequence
  Description of Artificial Sequence: Synthetic polypeptide
QVQLVQSGAEVKKPGSSVKVSCKASGGTFNNYAIIWVRQAPGQGLEWMGGILPVFGTTNYTQNLQGRVKITADESTSTAYMELSRLKYEDTAVYYCARDSGTASFDYWGQGTLVIVSS

SEQ ID NO: 2515 - protein, 11 aa, Artificial Sequence
  Description of Artificial Sequence: Synthetic peptide
ARDSGTASFDY

SEQ ID NO: 2516 - DNA, 325 bp, Artificial Sequence
  Description of Artificial Sequence: Synthetic polynucleotide
gacatccagttgacccagtctccatccttcctgtctgcatctgtaggagacagagtcaccatcacttgccgggccagtcaggccattagcgattatttagcctggtatcagcaaaaaccagggaaagcccctaagctcctgatctatgctgcatccactttgcaaagtggggtcccatcaaggttcagcggcagtggatctgggacagaattcactctcacaatcagcagcctgcagcctgaagattttgcaacttattactgtcaagaccttaatagttacctttcggtcactttcggcggagggaccaaggtggagatcaaac

SEQ ID NO: 2517 - protein, 108 aa, Artificial Sequence
  Description of Artificial Sequence: Synthetic polypeptide
DIQLTQSPSFLSASVGDRVTITCRASQAISDYLAWYQQKPGKAPKLLIYAASTLQSGVPSRFSGSGSGTEFTLTISSLQPEDFATYYCQDLNSYLSVTFGGGTKVEIK

SEQ ID NO: 2518 - protein, 10 aa, Artificial Sequence
  Description of Artificial Sequence: Synthetic peptide
QDLNSYLSVT

SEQ ID NO: 2519 - DNA, 355 bp, Artificial Sequence
  Description of Artificial Sequence: Synthetic polynucleotide
caggtgcagctggtgcagtctggggctgaggtgaagaagcctgggtcctcggtgaaggtctcctgcaaggcttctggaggcaccttcagcaactatgccatcaactgggtgcgacaggcccctggacaagggcttgagtggatgggagggatcatccctgtttttggtacagcgaactacgcacagaagtttcagggcagagtcacgattagtgcggacgagtccacgagaacagcctacatggagttgattagactgagacctgaggacacggccgtgtattactgtgcgcgagatgggggcacggcgtcatttgactactggggccagggaacccttgtcaccgtctcctcag

SEQ ID NO: 2520 - protein, 118 aa, Artificial Sequence
  Description of Artificial Sequence: Synthetic polypeptide
QVQLVQSGAEVKKPGSSVKVSCKASGGTFSNYAINWVRQAPGQGLEWMGGIIPVFGTANYAQKFQGRVTISADESTRTAYMELIRLRPEDTAVYYCARDGGTASFDYWGQGTLVTVSS

SEQ ID NO: 2521 - protein, 11 aa, Artificial Sequence
  Description of Artificial Sequence: Synthetic peptide
ARDGGTASFDY

SEQ ID NO: 2522 - DNA, 334 bp, Artificial Sequence
  Description of Artificial Sequence: Synthetic polynucleotide
gatattgtgatgactcagtctccactctccctgcccgtcagccctggagagccggcctccatctcctgtaggtctagtcagagcctcctgcatcgtgatggtcacaactatttggattggtatttgcagaagccagggcagtctccacagctcctgatctattggggttctaatcgggcctccggggtccctgacaggttcagtggcagtggatcaggcacagattttacactgaaaatcagcagagtggaggctgaagatgttggggtttattactgcatgcaagctctacaaaccttcactttcggccctgggaccaaagtggatatcaaac

SEQ ID NO: 2523 - protein, 111 aa, Artificial Sequence
  Description of Artificial Sequence: Synthetic polypeptide
DIVMTQSPLSLPVSPGEPASISCRSSQSLLHRDGHNYLDWYLQKPGQSPQLLIYWGSNRASGVPDRFSGSGSGTDFTLKISRVEAEDVGVYYCMQALQTFTFGPGTKVDIK

SEQ ID NO: 2524 - protein, 8 aa, Artificial Sequence
  Description of Artificial Sequence: Synthetic peptide
MQALQTFT

SEQ ID NO: 2525 - DNA, 352 bp, Artificial Sequence
  Description of Artificial Sequence: Synthetic polynucleotide
caggtgcagctggtgcagtctggggctgaggtaaagaggcctgggtcctcggtgaaggtctcctgcaaggcttctggaggcaccttcaacacctttactatcacctgggtgcgacaggcccctggacaggcgcctgagtggatgggaggaatcatccctgtctttggaacaccagactacgcacagaggttccagggcagactcaccattaccgcggacgaatccacggctacaggcttcatggaactgagtactttgagccctgaggacacggccatgtattactgtgcgagagcgggagtcggggcaattgactactggggccagggaaccctggtcatcgtctcctcag

SEQ ID NO: 2526 - protein, 117 aa, Artificial Sequence
  Description of Artificial Sequence: Synthetic polypeptide
QVQLVQSGAEVKRPGSSVKVSCKASGGTFNTFTITWVRQAPGQAPEWMGGIIPVFGTPDYAQRFQGRLTITADESTATGFMELSTLSPEDTAMYYCARAGVGAIDYWGQGTLVIVSS

SEQ ID NO: 2527 - protein, 10 aa, Artificial Sequence
  Description of Artificial Sequence: Synthetic peptide
ARAGVGAIDY

SEQ ID NO: 2528 - DNA, 337 bp, Artificial Sequence
  Description of Artificial Sequence: Synthetic polynucleotide
gatattgtgatgactcagtctccactctccctgcccgtcacccctggagagccggcctccatctcctgcaggtctagtcagagtctcctgcatagcaatggatacaactatgtggattggtacctgcagaagccagggcagtctccacaactcctgatctatttgggttctgatcgggcctccggggtccctgacaggttcagtggcagtggatcaggcacatattttacactggagatcagcagagtggaggctgaggatgttggggtttattactgcatgcaaggtctacgaacccctctcaccttcggccaaggtacacgactggagattaaac

SEQ ID NO: 2529 - protein, 112 aa, Artificial Sequence
  Description of Artificial Sequence: Synthetic polypeptide
DIVMTQSPLSLPVTPGEPASISCRSSQSLLHSNGYNYVDWYLQKPGQSPQLLIYLGSDRASGVPDRFSGSGSGTYFTLEISRVEAEDVGVYYCMQGLRTPLTFGQGTRLEIK

SEQ ID NO: 2530 - protein, 9 aa, Artificial Sequence
  Description of Artificial Sequence: Synthetic peptide
MQGLRTPLT

SEQ ID NO: 2531 - DNA, 352 bp, Artificial Sequence
  Description of Artificial Sequence: Synthetic polynucleotide
caggttcagctggtgcagtctggaggtgaggtgaagaagcctggggcctcagtgaaggtctcctgcaaggcttctggttacacctttaccaactacggtatcaactgggtgcgacaggcccctggacaagggcttgagtgggtgggatggatcagcccttactttggtaacacaaactatgcacagaaactccagggcagagtcaccctgaccacagacacatccacgaacacagcctacatggacctgaggagcctgagatcagacgacacggccgtgtattactgtgcgagactcccagcggcggctggtgactactggggccagggaaccctggtcaccgtctcctcag

SEQ ID NO: 2532 - protein, 117 aa, Artificial Sequence
  Description of Artificial Sequence: Synthetic polypeptide
QVQLVQSGGEVKKPGASVKVSCKASGYTFTNYGINWVRQAPGQGLEWVGWISPYFGNTNYAQKLQGRVTLTTDTSTNTAYMDLRSLRSDDTAVYYCARLPAAAGDYWGQGTLVTVSS

SEQ ID NO: 2533 - protein, 10 aa, Artificial Sequence
  Description of Artificial Sequence: Synthetic peptide
ARLPAAAGDY

SEQ ID NO: 2534 - DNA, 328 bp, Artificial Sequence
  Description of Artificial Sequence: Synthetic polynucleotide
gacatccagatgacccagtctccatcctccctgtctgcatctgtaggagacagagtcaccatcacttgccaggcgagtcaggacattaggaactatttaaattggtatcagcagaaaccagggaaagcccctaagctcctgatctacgatgcattcaatttggaaacaggggtcccatcaaggttcagtggaagtggatctgggacagattttactttcaccattagcagcctgcagcctgaagatattgcaacatattactgtcaacactataataatctccctcggatgtatagttttggccaggggacgaagctggagatcaaac

SEQ ID NO: 2535 - protein, 109 aa, Artificial Sequence
  Description of Artificial Sequence: Synthetic polypeptide
DIQMTQSPSSLSASVGDRVTITCQASQDIRNYLNWYQQKPGKAPKLLIYDAFNLETGVPSRFSGSGSGTDFTFTISSLQPEDIATYYCQHYNNLPRMYSFGQGTKLEIK

SEQ ID NO: 2536 - protein, 11 aa, Artificial Sequence
  Description of Artificial Sequence: Synthetic peptide
QHYNNLPRMYS

SEQ ID NO: 2537 - DNA, 358 bp, Artificial Sequence
  Description of Artificial Sequence: Synthetic polynucleotide
caggtgcagctggtgcagtctgggcctgaggtgaagaagcctgggtcctcggtgaaggtctcctgcaaggcttctggaggcaccttcagcaactatggaatcagctgggtgcgacaggcccctggacaagggcttgagtggatgggattgatcatccctatctttggcacagcgaactacgcacagaagttccagggcagagtcacgattaccgcggacgaatctacaaacacagtctacatggagctgagcagcctgagatctgaagacacggccttttattattgttcgagagatgacgggggtgggacttactcggcctactggggccagggaaccctggtcaccgtctcctcag

SEQ ID NO: 2538 - protein, 119 aa, Artificial Sequence
  Description of Artificial Sequence: Synthetic polypeptide
QVQLVQSGPEVKKPGSSVKVSCKASGGTFSNYGISWVRQAPGQGLEWMGLIIPIFGTANYAQKFQGRVTITADESTNTVYMELSSLRSEDTAFYYCSRDDGGGTYSAYWGQGTLVTVSS

SEQ ID NO: 2539 - protein, 12 aa, Artificial Sequence
  Description of Artificial Sequence: Synthetic peptide
SRDDGGGTYSAY

SEQ ID NO: 2540 - DNA, 337 bp, Artificial Sequence
  Description of Artificial Sequence: Synthetic polynucleotide
gatattgtgatgacccagactccactctctctgtccgtcacccctggacagccggcctccatctcctgcaagtctagtcagagcctcctgcatagggatggaaagacctatttccattggttctttcagaagccaggccagcctccacagcccctgatctatgaggtttccaatcggttctccggagtgccagataggttcagtggcagcgggtcggggacagattgcacactgaaaatcagccgggtggaggctgaggatgttggggtttattactgcatgcaaagcatacagcttccgctcactttcggcggagggaccaaggtggagatcaaac

SEQ ID NO: 2541 - protein, 112 aa, Artificial Sequence
  Description of Artificial Sequence: Synthetic polypeptide
DIVMTQTPLSLSVTPGQPASISCKSSQSLLHRDGKTYFHWFFQKPGQPPQPLIYEVSNRFSGVPDRFSGSGSGTDCTLKISRVEAEDVGVYYCMQSIQLPLTFGGGTKVEIK

SEQ ID NO: 2542 - protein, 9 aa, Artificial Sequence
  Description of Artificial Sequence: Synthetic peptide
MQSIQLPLT

SEQ ID NO: 2543 - DNA, 355 bp, Artificial Sequence
  Description of Artificial Sequence: Synthetic polynucleotide
caggtgcagctggtgcagtctggggctgaggtgaagaagcctgggtcctcggtgaagatctcctgcaagtcctctgggggcaccttcagtaactttgctatcaattgggtgcgacaggcccctggacaagggcttgagtggatgggagggatcatccctgtctttggtacagcacagtacgcacagaagttccagggcagagtcacgattaccgcggacgaatccacaagtacagtctacttggaggtgcgcagtctgcgatctgacgacacggccctacatttctgtgcgagagaggacggggtggcttcttttgactcctggggccagggaaccctggtcaccgtctcctcag

SEQ ID NO: 2544 - protein, 118 aa, Artificial Sequence
  Description of Artificial Sequence: Synthetic polypeptide
QVQLVQSGAEVKKPGSSVKISCKSSGGTFSNFAINWVRQAPGQGLEWMGGIIPVFGTAQYAQKFQGRVTITADESTSTVYLEVRSLRSDDTALHFCAREDGVASFDSWGQGTLVTVSS

SEQ ID NO: 2545 - protein, 11 aa, Artificial Sequence
  Description of Artificial Sequence: Synthetic peptide
AREDGVASFDS

SEQ ID NO: 2546 - DNA, 322 bp, Artificial Sequence
  Description of Artificial Sequence: Synthetic polynucleotide
gacatccagatgacccagtctccatcctccctgtctgcatctgtaggagacagagtcaccatcgcttgccgggcaagtcagagcattagcagttatttaaattggtatcagcagaaaccagggaaagcccctaaactcctgatctatgctgcatccagtttgcaaagtggggtcccatcaaggttcagtggcagtggatctggggcagatttcactctcaccatcagcagtctgcagcctgaagattctgcgacttactactgtcaacagagttacagaacccctaagacgttcggccaagggaccaaggtggaaatcgaac

SEQ ID NO: 2547 - protein, 107 aa, Artificial Sequence
  Description of Artificial Sequence: Synthetic polypeptide
DIQMTQSPSSLSASVGDRVTIACRASQSISSYLNWYQQKPGKAPKLLIYAASSLQSGVPSRFSGSGSGADFTLTISSLQPEDSATYYCQQSYRTPKTFGQGTKVEIE

SEQ ID NO: 2548 - protein, 9 aa, Artificial Sequence
  Description of Artificial Sequence: Synthetic peptide
QQSYRTPKT

SEQ ID NO: 2549 - DNA, 364 bp, Artificial Sequence
  Description of Artificial Sequence: Synthetic polynucleotide
caggtgcagctggtgcagtctggggctgaagtgaagaagcctggggcctcagtgaaggtttcctgcaaggcatctggatacaccttcagcaactactatattcactgggtgcgacaggcccctggacaagggcttgagtggatgggaatcctcaaccctagtggtggtagcacaagctacgcacagaagttcgagggcagagtcaccatgaccagtgacacgtccacgagtacagtaaacatgcagctgagcagcctgagatctgacgacacggccgtatattactgtgcgaaagttagagggggtagcagtggctgggcttttgatgtctggggccaagggacaatggtcaccgtctcttcag

SEQ ID NO: 2550 - protein, 121 aa, Artificial Sequence
  Description of Artificial Sequence: Synthetic polypeptide
QVQLVQSGAEVKKPGASVKVSCKASGYTFSNYYIHWVRQAPGQGLEWMGILNPSGGSTSYAQKFEGRVTMTSDTSTSTVNMQLSSLRSDDTAVYYCAKVRGGSSGWAFDVWGQGTMVTVSS

SEQ ID NO: 2551 - protein, 14 aa, Artificial Sequence
  Description of Artificial Sequence: Synthetic peptide
AKVRGGSSGWAFDV

SEQ ID NO: 2552 - DNA, 307 bp, Artificial Sequence
  Description of Artificial Sequence: Synthetic polynucleotide
gacatccagatgacccagtctccttccaccctgtctgcatctgttggagacagagtcaccatcacttgccgggccagtcagagtcttagtaactgggtagcctggtatcagcaaaaaccagggaaagcccctaagctcctgatctataaggcgtctagtttagaaagtggggtcccatcaaggttcagcggcagtggatctgggacagaattcactctcaccatcagtagcctgcagcctgatgattttgcaacttattactgccaacagtttagcgcgttcggccaagggaccaaggtggaaatca

SEQ ID NO: 2553 - protein, 102 aa, Artificial Sequence
  Description of Artificial Sequence: Synthetic polypeptide
DIQMTQSPSTLSASVGDRVTITCRASQSLSNWVAWYQQKPGKAPKLLIYKASSLESGVPSRFSGSGSGTEFTLTISSLQPDDFATYYCQQFSAFGQGTKVEI

SEQ ID NO: 2554 - protein, 5 aa, Artificial Sequence
  Description of Artificial Sequence: Synthetic peptide
QQFSA

SEQ ID NO: 2555 - DNA, 367 bp, Artificial Sequence
  Description of Artificial Sequence: Synthetic polynucleotide
caggtacagctgcagcagtcaggtccaggactggtgaagccctcgcagaccctctcagtcacctgtgccatctccggggacagtatctcaagcgaaactgctgtttggaactggatcaggcagtccccgtcgagaggccttgagtggctgggaaggacatactataggtccgagtggtactttgattatgcaatatctgtgaaaagtcgaataaccatcagcccagacacatccaggaaccaattctccctgcaactgcactctgtgactcccgacgacacggctgtctattattgtgcaagagatggaaatggcgtatggtatattgactactggggccagggaaccctggtcaccgtctcctcag

SEQ ID NO: 2556 - protein, 122 aa, Artificial Sequence
  Description of Artificial Sequence: Synthetic polypeptide
QVQLQQSGPGLVKPSQTLSVTCAISGDSISSETAVWNWIRQSPSRGLEWLGRTYYRSEWYFDYAISVKSRITISPDTSRNQFSLQLHSVTPDDTAVYYCARDGNGVWYIDYWGQGTLVTVSS

SEQ ID NO: 2557 - protein, 12 aa, Artificial Sequence
  Description of Artificial Sequence: Synthetic peptide
ARDGNGVWYIDY

SEQ ID NO: 2558 - DNA, 322 bp, Artificial Sequence
  Description of Artificial Sequence: Synthetic polynucleotide
gaaatagtgatgacgcagtctccagccaccctgtctgtgtctccaggggagagagccaccctctcctgcagggccagtcagagtgttggcagcagcttagcctggttccagcagaaacctgggcaggctcccaggctcctcatccatggtgcatccaccagggccactggtatcccagccaggttcagtggcagtgggtctgcgacagagttcactctcatcatcagtagcctgcagtctgaggattttgcagtttattactgtcagcagtatgataactggccgatcaccttcggccaagggacacgactggagattaaac

SEQ ID NO: 2559 - protein, 107 aa, Artificial Sequence
  Description of Artificial Sequence: Synthetic polypeptide
EIVMTQSPATLSVSPGERATLSCRASQSVGSSLAWFQQKPGQAPRLLIHGASTRATGIPARFSGSGSATEFTLIISSLQSEDFAVYYCQQYDNWPITFGQGTRLEIK

SEQ ID NO: 2560 - protein, 9 aa, Artificial Sequence
  Description of Artificial Sequence: Synthetic peptide
QQYDNWPIT

SEQ ID NO: 2561 - DNA, 355 bp, Artificial Sequence
  Description of Artificial Sequence: Synthetic polynucleotide
gaggtgcagctggtggagtctgggggtggcctggtcaggccgggggggtccctgagactctcctgtgcagcctctggattcaccttcagtatttctagtatggcttgggtccgccaggctccagggaaggggctggagtgggtcgcatccatgagtgacactggtagttatacatactacgcagactcattgaatggccgattcaccatctccagagacaacgccaagaactcactgtctctgcaaatgaacagcctgagagtcgaggacacggctctatatttctgtgttcactacggtgactacgcctattttgactactggggccagggagccctggtcaccgtctcctcag

SEQ ID NO: 2562 - protein, 118 aa, Artificial Sequence
  Description of Artificial Sequence: Synthetic polypeptide
EVQLVESGGGLVRPGGSLRLSCAASGFTFSISSMAWVRQAPGKGLEWVASMSDTGSYTYYADSLNGRFTISRDNAKNSLSLQMNSLRVEDTALYFCVHYGDYAYFDYWGQGALVTVSS

SEQ ID NO: 2563 - protein, 11 aa, Artificial Sequence
  Description of Artificial Sequence: Synthetic peptide
VHYGDYAYFDY

SEQ ID NO: 2564 - DNA, 325 bp, Artificial Sequence
  Description of Artificial Sequence: Synthetic polynucleotide
gacatccagatgacccagtctccttccaccctgtctgcatcggtaggagacagagtcaccatcacttgccgggccagtcagagtattagtaggtggttggcctggtatcagcagaaaccagggaaagcccctaaagtcctgatctataaggcgtctagtttagaaagtggggtcccatcaaggttcagcggcagtggatctgggacagaattcactctcaccatcagcagcctgcagcctgatgattttgcaacttattactgccaacagtataatacttattctaaaatcactttcggcggagggaccaaggtggagatcaaac

SEQ ID NO: 2565 - protein, 108 aa, Artificial Sequence
  Description of Artificial Sequence: Synthetic polypeptide
DIQMTQSPSTLSASVGDRVTITCRASQSISRWLAWYQQKPGKAPKVLIYKASSLESGVPSRFSGSGSGTEFTLTISSLQPDDFATYYCQQYNTYSKITFGGGTKVEIK

SEQ ID NO: 2566 - protein, 10 aa, Artificial Sequence
  Description of Artificial Sequence: Synthetic peptide
QQYNTYSKIT

SEQ ID NO: 2567 - DNA, 373 bp, Artificial Sequence
  Description of Artificial Sequence: Synthetic polynucleotide
caggtgcagctggtggagtctgggggaggcgtggtccagcctgggaggtccctgagactctcctgtgcagcctctggattcatcttcagtgatcatagtatgtcctgggtccgccaggctccaggcaaggggctggagtgggtggcagttatatcatatatacttccatcatatactggaaacaatgaagactacgcagactccgtgaggggccgattcaccatctccagagacgattccaagaacatgttatttctggaaatgaatagtctgagaggtgaggacacggctgtgtattattgtgcgagagatcggggacacagcagtggctttgactcctggggccagggaaccctggtcaccgtctcctcag

SEQ ID NO: 2568 - protein, 124 aa, Artificial Sequence
  Description of Artificial Sequence: Synthetic polypeptide
QVQLVESGGGVVQPGRSLRLSCAASGFIFSDHSMSWVRQAPGKGLEWVAVISYILPSYTGNNEDYADSVRGRFTISRDDSKNMLFLEMNSLRGEDTAVYYCARDRGHSSGFDSWGQGTLVTVSS

SEQ ID NO: 2569 - protein, 12 aa, Artificial Sequence
  Description of Artificial Sequence: Synthetic peptide
ARDRGHSSGFDS

SEQ ID NO: 2570 - DNA, 322 bp, Artificial Sequence
  Description of Artificial Sequence: Synthetic polynucleotide
gaaatagtgatgacgcagtctccagccaccctgtctgtgtctccaggggaaagagccaccctctcctgcagggccagtcagagtattggtagcaactttgcctggtaccagcagaagcctggccaggctcccaggctcctcatccatgatgcatccaccagggccactggtatctcagccaggttcagcggcagtgggtctgggacacagttcactctcaccatcaccagcctgcagtctgaagattttgcagtttattactgtcagcaatataataactggcctctgacgttcggccaagggaccaaggtcgaaatcaaac

SEQ ID NO: 2571 - protein, 107 aa, Artificial Sequence
  Description of Artificial Sequence: Synthetic polypeptide
EIVMTQSPATLSVSPGERATLSCRASQSIGSNFAWYQQKPGQAPRLLIHDASTRATGISARFSGSGSGTQFTLTITSLQSEDFAVYYCQQYNNWPLTFGQGTKVEIK

SEQ ID NO: 2572 - protein, 9 aa, Artificial Sequence
  Description of Artificial Sequence: Synthetic peptide
QQYNNWPLT

SEQ ID NO: 2573 - DNA, 355 bp, Artificial Sequence
  Description of Artificial Sequence: Synthetic polynucleotide
caggtgcagctggtgcagtctggggctgaggtgaagaagcctgggtcctcggtgaaggtctcctgcaaggcttctggaggcatcttcagcaactttgaaatcagctgggtgcgacaggcccctggacaaggtcttgagtggatgggaggggtcatccctttctttggtacagcaaagtatgcacagaagttccagggcagagtcacgattagcgcggacacatccacgagcacaggctacatggagctgagcagcctgagatctgaggacacggccgtatattactgtgcgagagacgatggttcagggagttatgcctactggggccagggaaccctggtcaccgtctcctcag

SEQ ID NO: 2574 - protein, 118 aa, Artificial Sequence
  Description of Artificial Sequence: Synthetic polypeptide
QVQLVQSGAEVKKPGSSVKVSCKASGGIFSNFEISWVRQAPGQGLEWMGGVIPFFGTAKYAQKFQGRVTISADTSTSTGYMELSSLRSEDTAVYYCARDDGSGSYAYWGQGTLVTVSS

SEQ ID NO: 2575 - protein, 11 aa, Artificial Sequence
  Description of Artificial Sequence: Synthetic peptide
ARDDGSGSYAY

SEQ ID NO: 2576 - DNA, 337 bp, Artificial Sequence
  Description of Artificial Sequence: Synthetic polynucleotide
gatattgtgatgactcagtctccactctccctgcccgtcacccctggagagtcggcctccatctcctgcaggtctagtcagagcctcctacatcgtagtggatacaactatttggattggtacctgcagaagccagggcagtctccacagctcctgatctatttgggttctaatcgggcctccggggtccctgacaggttcagtggcagtggatcaggcacagattttacactgaaaatcagcagagtggaggctgaggatgttggggtttattactgcatgcaagctctacaaactcctcggacgttcggccaagggaccaaggtggaaatcaaac

SEQ ID NO: 2577 - protein, 112 aa, Artificial Sequence
  Description of Artificial Sequence: Synthetic polypeptide
DIVMTQSPLSLPVTPGESASISCRSSQSLLHRSGYNYLDWYLQKPGQSPQLLIYLGSNRASGVPDRFSGSGSGTDFTLKISRVEAEDVGVYYCMQALQTPRTFGQGTKVEIK

SEQ ID NO: 2578 - protein, 9 aa, Artificial Sequence
  Description of Artificial Sequence: Synthetic peptide
MQALQTPRT

SEQ ID NO: 2579 - DNA, 347 bp, Artificial Sequence
  Description of Artificial Sequence: Synthetic polynucleotide
caggtgcagctggtgcagtctggggctgaggtgaggaagcctgggtcctcggtgagggtctcctgcaaggcttctggaggcaccttcaacaactatgccatcaactgggtgcgacaggcccctggacaagggcttgagtggatgggaaagatcatccctttctttggcacgccacactacgcacagaaatttcagggcagactcacaattaccgcggacaaatccacgagcacagcctacatggaactgaccagtctgacatctgaggacacggccgtctatttctgtgcgagaggtccctggggttgggactactggggccagggaaccctggtcgccgtctcctc

SEQ ID NO: 2580 - protein, 115 aa, Artificial Sequence
  Description of Artificial Sequence: Synthetic polypeptide
QVQLVQSGAEVRKPGSSVRVSCKASGGTFNNYAINWVRQAPGQGLEWMGKIIPFFGTPHYAQKFQGRLTITADKSTSTAYMELTSLTSEDTAVYFCARGPWGWDYWGQGTLVAVS

SEQ ID NO: 2581 - protein, 9 aa, Artificial Sequence
  Description of Artificial Sequence: Synthetic peptide
ARGPWGWDY

SEQ ID NO: 2582 - DNA, 322 bp, Artificial Sequence
  Description of Artificial Sequence: Synthetic polynucleotide
gaaattgtgttgacgcagtctccaggcaccctgtccttgtctccaggggaaagagccatcctctcttgcagggccagtcagagtgttagcagcgactacttcgcctggtaccagcagaaacctggccaggctcccaggctcctcatgtatggtacatccaccagggccactggcatcccggacaggttcagtggcagggggtctgagacagacttcactctcaccatcagcagactggagcctgcagattttgcagtgtattattgtcagcagtatggtacctcacccactttcggcggagggaccaaggtggagatcaaac

SEQ ID NO: 2583 - protein, 107 aa, Artificial Sequence
  Description of Artificial Sequence: Synthetic polypeptide
EIVLTQSPGTLSLSPGERAILSCRASQSVSSDYFAWYQQKPGQAPRLLMYGTSTRATGIPDRFSGRGSETDFTLTISRLEPADFAVYYCQQYGTSPTFGGGTKVEIK

SEQ ID NO: 2584 - protein, 8 aa, Artificial Sequence
  Description of Artificial Sequence: Synthetic peptide
QQYGTSPT

SEQ ID NO: 2585 - DNA, 378 bp, Artificial Sequence
  Description of Artificial Sequence: Synthetic polynucleotide
caggttcagctggtgcagtctggagttgaggtgaagaagcctggggcctcagtgaaggtctcctgcagggcttctggttacagttttaccgactacggtatcagttgggtgcgacaggcccctggacaagggcctgagtggatgggatggatcagcacctacaatggtaaaacaaactatgcacagaagactcagggcagagtcaccatgaccaaggacacatccacgaacacagtctacatggaaatgaggagtctgagatctgacgacacggccgtgtattactgtgcgagaggacttggttccggtttttggagtggtaatttctactacggcttggacgtctggggccaagggaccacggtcatcgtctcctca

SEQ ID NO: 2586 - protein, 126 aa, Artificial Sequence
  Description of Artificial Sequence: Synthetic polypeptide
QVQLVQSGVEVKKPGASVKVSCRASGYSFTDYGISWVRQAPGQGPEWMGWISTYNGKTNYAQKTQGRVTMTKDTSTNTVYMEMRSLRSDDTAVYYCARGLGSGFWSGNFYYGLDVWGQGTTVIVSS

SEQ ID NO: 2587 - protein, 19 aa, Artificial Sequence
  Description of Artificial Sequence: Synthetic peptide
ARGLGSGFWSGNFYYGLDV

SEQ ID NO: 2588 - DNA, 346 bp, Artificial Sequence
  Description of Artificial Sequence: Synthetic polynucleotide
gatattgtgatgactcagtctccactctccctgcccgtcacccctggagagccggcctccatctcctgtaggtctagtcagagcctcctggatagtaatggatacaactatttggattggtacctgcagaggccagggcagtctccacagctcctgatctttttggcttctagtcgggcctccggggtccctgacaggttcagtggcagtggatcaggcacacatttcacactgaagatcagcagagtggaggctgaggatgttggggtttattactgcatgcaagctctacaaactccggcccaggcgtggacgttcggccaagggaccaaggtggaaatcaaac

SEQ ID NO: 2589 - protein, 115 aa, Artificial Sequence
  Description of Artificial Sequence: Synthetic polypeptide
DIVMTQSPLSLPVTPGEPASISCRSSQSLLDSNGYNYLDWYLQRPGQSPQLLIFLASSRASGVPDRFSGSGSGTHFTLKISRVEAEDVGVYYCMQALQTPAQAWTFGQGTKVEIK

SEQ ID NO: 2590 - protein, 12 aa, Artificial Sequence
  Description of Artificial Sequence: Synthetic peptide
MQALQTPAQAWT

SEQ ID NO: 2591 - DNA, 349 bp, Artificial Sequence
  Description of Artificial Sequence: Synthetic polynucleotide
caggtgcagctggtgcagtctggggctgaggtgaagaagcctgggtcctcggtgaaggtctcctgcaaggcttctggaggcaccttcagcaactatcctatcacctgggtgcgacaggcccctggacaagggcttgagtggatgggagagatcatgcctgtctttggtacaccaatctacgcacagaagttccagggcacagtcacgattaccgcggaccaatcaacgagcacagcctacttggaggtgaccagtctgagatatgaggacacggccgtgtattactgtgcgagaggtgtttggggcttagattattggggccagggatccccggtcaccgtctcctcag

SEQ ID NO: 2592 - protein, 116 aa, Artificial Sequence
  Description of Artificial Sequence: Synthetic polypeptide
QVQLVQSGAEVKKPGSSVKVSCKASGGTFSNYPITWVRQAPGQGLEWMGEIMPVFGTPIYAQKFQGTVTITADQSTSTAYLEVTSLRYEDTAVYYCARGVWGLDYWGQGSPVTVSS

SEQ ID NO: 2593 - protein, 9 aa, Artificial Sequence
  Description of Artificial Sequence: Synthetic peptide
ARGVWGLDY

SEQ ID NO: 2594 - DNA, 322 bp, Artificial Sequence
  Description of Artificial Sequence: Synthetic polynucleotide
gaaattgtgttgacgcagtctccaggcaccctgtctttgtctccaggggaaagagccaccctctcctgcagggccagtcagagtattaacagcgactacttagcctggtatcagcttaaacctggccagactcccagactcctcatctatggagcatccagcagggccactggcatcccagacaggttcagtggcagtgggtctgggacagacttcactctcaccatcagcagactggagcctgaagattttgcagtgtattactgtcatcactatggtaattcacggacgttcggccaagggaccaaggtggaaatcaaac

SEQ ID NO: 2595 - protein, 107 aa, Artificial Sequence
  Description of Artificial Sequence: Synthetic polypeptide
EIVLTQSPGTLSLSPGERATLSCRASQSINSDYLAWYQLKPGQTPRLLIYGASSRATGIPDRFSGSGSGTDFTLTISRLEPEDFAVYYCHHYGNSRTFGQGTKVEIK

SEQ ID NO: 2596 - protein, 8 aa, Artificial Sequence
  Description of Artificial Sequence: Synthetic peptide
HHYGNSRT

SEQ ID NO: 2597 - DNA, 358 bp, Artificial Sequence
  Description of Artificial Sequence: Synthetic polynucleotide
caggtgcagctggtgcagtctggggctgaggtgaagaagcctgggtcctcggtgaaggtctcctgcaaggcttctggaggcaccttcagcaactatgctatcagctgggtgcgacaggcccctggacaagggcttgagtggatgggaggggtcatccctatctttggtagaccaacctacgcacagaagttccagggcagagtcacgattaacgcggacgaatccacgagcacagcctacatggagctgagcagcctgagatctgaggacacggccgtctattactgtgcccgggcggggggagcagtggctggtcttgactactggggccagggaaccctggtcaccgtctcctcag

SEQ ID NO: 2598 - protein, 119 aa, Artificial Sequence
  Description of Artificial Sequence: Synthetic polypeptide
QVQLVQSGAEVKKPGSSVKVSCKASGGTFSNYAISWVRQAPGQGLEWMGGVIPIFGRPTYAQKFQGRVTINADESTSTAYMELSSLRSEDTAVYYCARAGGAVAGLDYWGQGTLVTVSS

SEQ ID NO: 2599 - protein, 12 aa, Artificial Sequence
  Description of Artificial Sequence: Synthetic peptide
ARAGGAVAGLDY

SEQ ID NO: 2600 - DNA, 325 bp, Artificial Sequence
  Description of Artificial Sequence: Synthetic polynucleotide
gacatccagatgacccagtctccttccaccctgtctgcatctgtaggagacagagtcaccatcacttgccgggccagtcagagtattagtagctggttggcctggtatcagcagaaaccagggaaagcccctaagctcctgatctatgaggcgtctaatttagatagtggggtcccgtcaaggttcagcggcagtggatctgggacagaattcactctcactatcaacagcctgcagcctgatgattttgcaacttattactgccaacagtataatacttattcgggggggacgttcggccaagggaccaagctggaaatcaaac

SEQ ID NO: 2601 - protein, 108 aa, Artificial Sequence
  Description of Artificial Sequence: Synthetic polypeptide
DIQMTQSPSTLSASVGDRVTITCRASQSISSWLAWYQQKPGKAPKLLIYEASNLDSGVPSRFSGSGSGTEFTLTINSLQPDDFATYYCQQYNTYSGGTFGQGTKLEIK

SEQ ID NO: 2602 - protein, 10 aa, Artificial Sequence
  Description of Artificial Sequence: Synthetic peptide
QQYNTYSGGT

SEQ ID NO: 2603 - DNA, 349 bp, Artificial Sequence
  Description of Artificial Sequence: Synthetic polynucleotide
caggtgcagctggtgcagtctggggctgaggtgaagaaacatgggtcctcggtgaaggtctcctgcaaggcttctggaggcaccttcagcaactatgcaatcaactgggtgcgacaggcccctggacaagggcttgagtggatgggaaaaatcatcccttcctttggaacacctcactacgcacagaagttccagggtagactcacgataaccgcggacgtctccacgaacacaggctacatggagctgaacagcctgacatctgaggacacggccgtgtattactgtgcgagaggtccctggggttgggaccactggggccagggagccctggtcaccgtctcctcag

SEQ ID NO: 2604 - protein, 116 aa, Artificial Sequence
  Description of Artificial Sequence: Synthetic polypeptide
QVQLVQSGAEVKKHGSSVKVSCKASGGTFSNYAINWVRQAPGQGLEWMGKIIPSFGTPHYAQKFQGRLTITADVSTNTGYMELNSLTSEDTAVYYCARGPWGWDHWGQGALVTVSS

SEQ ID NO: 2605 - protein, 9 aa, Artificial Sequence
  Description of Artificial Sequence: Synthetic peptide
ARGPWGWDH

SEQ ID NO: 2606 - DNA, 322 bp, Artificial Sequence; identical to SEQ ID NO: 134
  Description of Artificial Sequence: Synthetic polynucleotide

SEQ ID NO: 2607 - protein, 107 aa, Artificial Sequence; identical to SEQ ID NO: 16
  Description of Artificial Sequence: Synthetic polypeptide

SEQ ID NO: 2608 - protein, 8 aa, Artificial Sequence
  Description of Artificial Sequence: Synthetic peptide
QQYGSSPT

SEQ ID NO: 2609 - DNA, 364 bp, Artificial Sequence
  Description of Artificial Sequence: Synthetic polynucleotide
caggttcagctggtgcagtctggagctgaggtgaagaagcctggggcctcagtgaaggtctcctgcaaggcctctggttatacctttagtaactatggtatcaattgggtgcgacaggcccctggacaagggcttgagtggctgggatggatcagcattgagagaggtaacacaaattatctccagaagctccagggcagactcactatgaccacagactcatccacgaacacagcctatatggagttgaggagcctgagatctgacgacacggccgtgtattactgtgcgagagatcggcatcagtatgacagtgctggattttcggactggggccagggaaccctggtcaccgtctcctcag

SEQ ID NO: 2610 - protein, 121 aa, Artificial Sequence
  Description of Artificial Sequence: Synthetic polypeptide
QVQLVQSGAEVKKPGASVKVSCKASGYTFSNYGINWVRQAPGQGLEWLGWISIERGNTNYLQKLQGRLTMTTDSSTNTAYMELRSLRSDDTAVYYCARDRHQYDSAGFSDWGQGTLVTVSS

SEQ ID NO: 2611 - protein, 14 aa, Artificial Sequence
  Description of Artificial Sequence: Synthetic peptide
ARDRHQYDSAGFSD

SEQ ID NO: 2612 - DNA, 322 bp, Artificial Sequence
  Description of Artificial Sequence: Synthetic polynucleotide
gaaattgtgttgacacagtctccagccaccctgtctttgtctccaggggaaagagccaccctctcctgcagggccagtcagagtgttagcagctacttagcctggtaccaacagaaacctggccaggctcccagtctcctcatctatgatgcatccaacagggccactggcatcccagccaggttcagtggcagtgggtctgggacagacttcactctcaccatcagcagcctagagcctgaagattttgcagtttattactgtcagcagcgtagcaactggccgctcactttcggcggagggaccaaggtggagatcaaac

SEQ ID NO: 2613 - protein, 107 aa, Artificial Sequence
  Description of Artificial Sequence: Synthetic polypeptide
EIVLTQSPATLSLSPGERATLSCRASQSVSSYLAWYQQKPGQAPSLLIYDASNRATGIPARFSGSGSGTDFTLTISSLEPEDFAVYYCQQRSNWPLTFGGGTKVEIK

SEQ ID NO: 2614 - protein, 9 aa, Artificial Sequence
  Description of Artificial Sequence: Synthetic peptide
QQRSNWPLT

SEQ ID NO: 2615 - DNA, 364 bp, Artificial Sequence
  Description of Artificial Sequence: Synthetic polynucleotide
caggtgcagctggtgcagtctggggctgaggtgaagaagcctgggtcctcggtgaaggtctcctgcaaggcttccggaggctccctcagggaatatgctattagttgggtgcgacaggcccctggacaagggcttgagtggatgggagtggtcatctttggtacaggaaactacccagagaagttccagggcagagtcacgattaccgcggacgaatccacgaacacagtttatatggaactgaccagcctgaaatctgaagacacggccgtgtatttctgtgcgagagatccgccagactacggtggtaaccccgaagacttccaggaatggggccaagggaccctggtcaccgtctcttcag

SEQ ID NO: 2616 - protein, 121 aa, Artificial Sequence
  Description of Artificial Sequence: Synthetic polypeptide
QVQLVQSGAEVKKPGSSVKVSCKASGGSLREYAISWVRQAPGQGLEWMGVVIFGTGNYPEKFQGRVTITADESTNTVYMELTSLKSEDTAVYFCARDPPDYGGNPEDFQEWGQGTLVTVSS

SEQ ID NO: 2617 - protein, 16 aa, Artificial Sequence
  Description of Artificial Sequence: Synthetic peptide
ARDPPDYGGNPEDFQE

SEQ ID NO: 2618 - DNA, 321 bp, Artificial Sequence
  Description of Artificial Sequence: Synthetic polynucleotide
gaaatagtgatgacgcagtctccagccaccctgtctgtgtctccagggggcagagccaccctctcctgcagggccagtcagagtgttactagcaacttagcctggtaccagcagaaacctggccagactcccaggctcctcatctatggtgcgtccaccagggccactggtgtcccagacaggttcagtggcactgggtctgggacagagttcaccctcaccatcagcagcctgcagtctgaagattttgcagtttattactgtcagcagtataataactggccgctcactttcggcggagggaccaaggtggagatcaaa

SEQ ID NO: 2619 - protein, 107 aa, Artificial Sequence
  Description of Artificial Sequence: Synthetic polypeptide
EIVMTQSPATLSVSPGGRATLSCRASQSVTSNLAWYQQKPGQTPRLLIYGASTRATGVPDRFSGTGSGTEFTLTISSLQSEDFAVYYCQQYNNWPLTFGGGTKVEIK

SEQ ID NO: 2620 - protein, 9 aa, Artificial Sequence
  Description of Artificial Sequence: Synthetic peptide
QQYNNWPLT

SEQ ID NO: 2621 - DNA, 358 bp, Artificial Sequence
  Description of Artificial Sequence: Synthetic polynucleotide
gaggtgcagctggtggagtctgggggcggcttggtgcagcctggagggtccctgagactctcctgtgcagcctctggattcattttcagtaactatgagatgaactgggtccgtcaggcaccagggaagggactggaatggatttcatacatcagtgatagtagtagtaattttcatcaggcagactctgtgaggggccgattcagcatctccagagacaacgccaagaattcactgtatctgcaaatggacagcctgagggccgaggacacgggtgtttattactgtgcgagaagtagagatcactacaattgttttgactactggggccagggaaccctggtcaccgtctcctcag

SEQ ID NO: 2622 - protein, 119 aa, Artificial Sequence
  Description of Artificial Sequence: Synthetic polypeptide
EVQLVESGGGLVQPGGSLRLSCAASGFIFSNYEMNWVRQAPGKGLEWISYISDSSSNFHQADSVRGRFSISRDNAKNSLYLQMDSLRAEDTGVYYCARSRDHYNCFDYWGQGTLVTVSS

SEQ ID NO: 2623 - protein, 12 aa, Artificial Sequence
  Description of Artificial Sequence: Synthetic peptide
ARSRDHYNCFDY

SEQ ID NO: 2624 - DNA, 325 bp, Artificial Sequence
  Description of Artificial Sequence: Synthetic polynucleotide
gacatccagatgacccagtctccttccaccctgtctgcatctgtaggagacagagtcaccatcacttgccgggccagtcagagtattagtaggtggttggcctggtatcaacagacaccagggaaagcccctaaactcctgatctatagggcgtctagtttagaaactggggtctcatcaaggttcagcggcagtggatctgggacagaattcactctcaccatcaacagcctgcagcctgaagattttgcaacttattactgccaacagtataatacttactctgcactcactttcggcggagggaccaaggtggagatcaaac

SEQ ID NO: 2625 - protein, 108 aa, Artificial Sequence
  Description of Artificial Sequence: Synthetic polypeptide
DIQMTQSPSTLSASVGDRVTITCRASQSISRWLAWYQQTPGKAPKLLIYRASSLETGVSSRFSGSGSGTEFTLTINSLQPEDFATYYCQQYNTYSALTFGGGTKVEIK

SEQ ID NO: 2626 - protein, 10 aa, Artificial Sequence
  Description of Artificial Sequence: Synthetic peptide
QQYNTYSALT

SEQ ID NO: 2627 - DNA, 364 bp, Artificial Sequence
  Description of Artificial Sequence: Synthetic polynucleotide
caggtgcagctggtggagtctgggggaggcgtggtccagcctgggaggtccctgagagtctcctgtgttgcctctggattcaggttcagtcgctatgcaatgcactgggtccgccaggccccaggcaaggggctggagtgggtggcagttatatcaaatgatgaaagtaataaagagtacgcagactccgcgaagggccgattcaccatctccagagacaactccaagaacaccctgtatctgcaaatgaacagcctgagagctgaggacacggcggtatattattgtggaagagacggcagtgactgggtagacaattggatcgacccctggggccagggaactctggtcaccgtctcctcag

SEQ ID NO: 2628 - protein, 121 aa, Artificial Sequence
  Description of Artificial Sequence: Synthetic polypeptide
QVQLVESGGGVVQPGRSLRVSCVASGFRFSRYAMHWVRQAPGKGLEWVAVISNDESNKEYADSAKGRFTISRDNSKNTLYLQMNSLRAEDTAVYYCGRDGSDWVDNWIDPWGQGTLVTVSS

SEQ ID NO: 2629 - protein, 14 aa, Artificial Sequence
  Description of Artificial Sequence: Synthetic peptide
GRDGSDWVDNWIDP

SEQ ID NO: 2630 - DNA, 322 bp, Artificial Sequence
  Description of Artificial Sequence: Synthetic polynucleotide
gaaatagtgatgacgcagtctccagccaccctgtctgtgtctccaggggaaagagccaccctctcctgcagggccagtcagagtgttggcaccaacttagcctggtaccagcagaaacctgggcaggctcccaggctcctcatctatggttcatccaccagggccactggtatcccagccaggttcagtggcagtgggtctgggacagagttcactctcaccatcagcagcctgcagtctgaagattttggagtttattactgtcagcagtatgattactggcccctcactttcggcggagggaccaaggtggagatcaaac

SEQ ID NO: 2631 - protein, 107 aa, Artificial Sequence
  Description of Artificial Sequence: Synthetic polypeptide
EIVMTQSPATLSVSPGERATLSCRASQSVGTNLAWYQQKPGQAPRLLIYGSSTRATGIPARFSGSGSGTEFTLTISSLQSEDFGVYYCQQYDYWPLTFGGGTKVEIK

SEQ ID NO: 2632 - protein, 9 aa, Artificial Sequence
  Description of Artificial Sequence: Synthetic peptide
QQYDYWPLT

SEQ ID NO: 2633 - DNA, 358 bp, Artificial Sequence
  Description of Artificial Sequence: Synthetic polynucleotide
caggtgcagctggtgcagtctggggctcaggtgaagaagcctgggtcctcggtgaaggtttcctgcaaggcttttggaggcaacttcaacaactttggtttccactgggtgcgacaggcccctggacaagggcttgagtggatgggaaggatcatccctatttttggtacagcagacagcgcacagaagtttcagggcagagtcacgatttccgccgacaaatccacgaccacagtttacatggaactgagcagcctgagatttgaggacacggccatgtattattgtgcgagagaaggggggggggacgcggcctttgactattggggccagggaaccctggtcaccgtctcctcag

SEQ ID NO: 2634 - protein, 119 aa, Artificial Sequence
  Description of Artificial Sequence: Synthetic polypeptide
QVQLVQSGAQVKKPGSSVKVSCKAFGGNFNNFGFHWVRQAPGQGLEWMGRIIPIFGTADSAQKFQGRVTISADKSTTTVYMELSSLRFEDTAMYYCAREGGGDAAFDYWGQGTLVTVSS

SEQ ID NO: 2635 - protein, 12 aa, Artificial Sequence
  Description of Artificial Sequence: Synthetic peptide
AREGGGDAAFDY

SEQ ID NO: 2636 - DNA, 337 bp, Artificial Sequence
  Description of Artificial Sequence: Synthetic polynucleotide
gatattgtgatgactcagtctccactctccctgcccgtcacccctggagagccggcctccatctcctgcaggtctagtcagagcctcctgcataggaatggatacaactatttggattggtacctgcagaagccagggcagtctccacaactgctgatctatttgggttctaatcgggcctccggggtccctgacaggttcagtggcactggatcaggcacagattttatactgaaaatcagcagagtggaggctgaggatgttggggtttattactgcatgcaagctctacaaactcctcggacgttcggccaagggaccaaggtggaaatcaaac

SEQ ID NO: 2637 - protein, 112 aa, Artificial Sequence
  Description of Artificial Sequence: Synthetic polypeptide
DIVMTQSPLSLPVTPGEPASISCRSSQSLLHRNGYNYLDWYLQKPGQSPQLLIYLGSNRASGVPDRFSGTGSGTDFILKISRVEAEDVGVYYCMQALQTPRTFGQGTKVEIK

SEQ ID NO: 2638 - protein, 9 aa, Artificial Sequence
  Description of Artificial Sequence: Synthetic peptide
MQALQTPRT

SEQ ID NO: 2639 - DNA, 358 bp, Artificial Sequence
  Description of Artificial Sequence: Synthetic polynucleotide
gaggtgcagctggtggagtctgggggaggcttggtacagcctggagggtccctgagactctcctgtgcagcctctggattcaccttcagtagttatgaaatgaattgggtccgccaggctccagggaaggggctggagtgggtttcatacattagtgatagtggtagtgacatatactacgcagactctctaaagggccgattcaccatctccagagacaacgccaagaactcactgtatctgcaaatgaacagcctgagagccgaggacacggccatttattactgtgcgagaagtagacataactacaattgtcttgactactggggccagggaaccctggtcaccgtctcctcag

SEQ ID NO: 2640 - protein, 119 aa, Artificial Sequence
  Description of Artificial Sequence: Synthetic polypeptide
EVQLVESGGGLVQPGGSLRLSCAASGFTFSSYEMNWVRQAPGKGLEWVSYISDSGSDIYYADSLKGRFTISRDNAKNSLYLQMNSLRAEDTAIYYCARSRHNYNCLDYWGQGTLVTVSS

SEQ ID NO: 2641 - protein, 12 aa, Artificial Sequence
  Description of Artificial Sequence: Synthetic peptide
ARSRHNYNCLDY

SEQ ID NO: 2642 - DNA, 325 bp, Artificial Sequence
  Description of Artificial Sequence: Synthetic polynucleotide
  modified_base (155)..(155): a, c, t, g, unknown or other
  modified_base (239)..(239): a, c, t, g, unknown or other
gacatccagatgacccagtctccttccaccctgtctgcatctgtaggagacagagtcaccatcacttgccgggccagtgagagtattagtaggtggttggcctggtatcagcagaaaccagggaaagcccctaagctcctgatatataaggcgtntaatttagaaagtggggtcccatcaaggtttagcggcagtggatctgggacagaattcactctcaccatcagcagcctgcagcntgatgattttgcaacttattactgccaacagtataatactttttctgagctcacttttggccgagggaccaaggtggagatcaaac

SEQ ID NO: 2643 - protein, 108 aa, Artificial Sequence
  Description of Artificial Sequence: Synthetic polypeptide
  MOD_RES (52)..(52): Any amino acid
  MOD_RES (80)..(80): Any amino acid
DIQMTQSPSTLSASVGDRVTITCRASESISRWLAWYQQKPGKAPKLLIYKAXNLESGVPSRFSGSGSGTEFTLTISSLQXDDFATYYCQQYNTFSELTFGRGTKVEIK

SEQ ID NO: 2644 - protein, 10 aa, Artificial Sequence
  Description of Artificial Sequence: Synthetic peptide
QQYNTFSELT

SEQ ID NO: 2645 - DNA, 355 bp, Artificial Sequence
  Description of Artificial Sequence: Synthetic polynucleotide
caggtgcagctggtgcagtctggggctgaggtgaagaggcctgggtcctcggtgaaggtctcctgcaaggcttctggaggcaccttcaacaactttgctttcagctgggtgcgacaggcccctggacaagggctcgagtggatgggacagatcatccctatctttattacaccaaactacgcacagaagttccggggcagagtcacgattaccgcggacgtatcgacgagcacagtctacatggagctgagtggcctgagatctgacgacacggccgtctattactgtgcgagggacggtggctaccacccccttgactactggggccagggaaccctggtcaccgtctcctcag

SEQ ID NO: 2646 - protein, 118 aa, Artificial Sequence
  Description of Artificial Sequence: Synthetic polypeptide
QVQLVQSGAEVKRPGSSVKVSCKASGGTFNNFAFSWVRQAPGQGLEWMGQIIPIFITPNYAQKFRGRVTITADVSTSTVYMELSGLRSDDTAVYYCARDGGYHPLDYWGQGTLVTVSS

SEQ ID NO: 2647 - protein, 11 aa, Artificial Sequence
  Description of Artificial Sequence: Synthetic peptide
ARDGGYHPLDY

SEQ ID NO: 2648 - DNA, 337 bp, Artificial Sequence
  Description of Artificial Sequence: Synthetic polynucleotide
gatattgtgatgactcagtctccactctccctgcccgtcacccctggagagccggcctccatctcctgcaggtctagtcagagtctccttcatagtactggatacaactatttggattggtacctgcagaagccaggccagcctccacagctcctgatctttttgggttctaatcgggcctccggggtccctgacaggttcagtggcagtggatcaggcacagattttacactgaaaatcagcagagtggaggctgaggatgttggggtttattactgcatgcaaggtctacgaactcctctcactttcggcggcgggaccaaggtggagatcaaac

SEQ ID NO: 2649 - protein, 112 aa, Artificial Sequence
  Description of Artificial Sequence: Synthetic polypeptide
DIVMTQSPLSLPVTPGEPASISCRSSQSLLHSTGYNYLDWYLQKPGQPPQLLIFLGSNRASGVPDRFSGSGSGTDFTLKISRVEAEDVGVYYCMQGLRTPLTFGGGTKVEIK

SEQ ID NO: 2650 - protein, 9 aa, Artificial Sequence
  Description of Artificial Sequence: Synthetic peptide
MQGLRTPLT

SEQ ID NO: 2651 - DNA, 352 bp, Artificial Sequence
  Description of Artificial Sequence: Synthetic polynucleotide
caggtgcagctggtgcagtctggggctgaggtgaagaagcctgggtcctcggtgaaggtctcctgcaagacttctggaggcaccttcagcaactacgctatcaactgggtgcgacaggcccctggacaaggacttgagtggatgggcaggatcatccctttctttggtacaccaaactacgcgcagaaattccaggacagagtcacgattaccgcggacgaatccacgaccacagtctacttggagttgagtagtctgagatctgaggacacggccgtctattactgttcgagagatagcggggcagtccttcttgactactggggccagggaaccctggtcaccgtctcct

SEQ ID NO: 2652 - protein, 117 aa, Artificial Sequence
  Description of Artificial Sequence: Synthetic polypeptide
QVQLVQSGAEVKKPGSSVKVSCKTSGGTFSNYAINWVRQAPGQGLEWMGRIIPFFGTPNYAQKFQDRVTITADESTTTVYLELSSLRSEDTAVYYCSRDSGAVLLDYWGQGTLVTVS

SEQ ID NO: 2653 - protein, 11 aa, Artificial Sequence
  Description of Artificial Sequence: Synthetic peptide
SRDSGAVLLDY

SEQ ID NO: 2654 - DNA, 337 bp, Artificial Sequence
  Description of Artificial Sequence: Synthetic polynucleotide
gatattgtgatgacccagactccactctctctgtccgtcacccctggacagccggcctcgatctcctgcaagtctagtgagagcctcctgcatagagatggaaagacctatttgtattggtacctgcagaagccaggccaggctccacagctcctgatctatgaagtttccaaccggatgtctggagtgccagacaggttcagtggcagcgggtcagggacagatttcacactgaaaatcagccgggtggaggctgaggatattggggtttattactgcatgcaaactatgcaggttcccctcactttcggccctgggaccaaagtggagatcaaac

SEQ ID NO: 2655 - protein, 112 aa, Artificial Sequence
  Description of Artificial Sequence: Synthetic polypeptide
DIVMTQTPLSLSVTPGQPASISCKSSESLLHRDGKTYLYWYLQKPGQAPQLLIYEVSNRMSGVPDRFSGSGSGTDFTLKISRVEAEDIGVYYCMQTMQVPLTFGPGTKVEIK

SEQ ID NO: 2656 - protein, 9 aa, Artificial Sequence
  Description of Artificial Sequence: Synthetic peptide
MQTMQVPLT

SEQ ID NO: 2657 - DNA, 355 bp, Artificial Sequence
  Description of Artificial Sequence: Synthetic polynucleotide
caggtgcagctggtgcagtctggggctgaggtgaagaagcctgggtcctcggtgaaggtctcctgcaaggcttctggaggcaccttcagcaactatgctatcagctgggtgcgacaggcccctggacaagggcttgagtggatgggagggatcatccctatctttggtacagcaaactacgcacagaagttccagggcagagtcacgattaccgcggacaaatccacgagcacagcctacatggagctgagcagcctgagatctgaagacacggccgtgtattactgttcgagagattcgggggacaaccctttggactactggggccagggaaccctggtcaccgtctcctcag

SEQ ID NO: 2658 - protein, 118 aa, Artificial Sequence
  Description of Artificial Sequence: Synthetic polypeptide
QVQLVQSGAEVKKPGSSVKVSCKASGGTFSNYAISWVRQAPGQGLEWMGGIIPIFGTANYAQKFQGRVTITADKSTSTAYMELSSLRSEDTAVYYCSRDSGDNPLDYWGQGTLVTVSS

SEQ ID NO: 2659 - protein, 11 aa, Artificial Sequence
  Description of Artificial Sequence: Synthetic peptide
SRDSGDNPLDY

SEQ ID NO: 2660 - DNA, 337 bp, Artificial Sequence
  Description of Artificial Sequence: Synthetic polynucleotide
gatattgtgatgactcagtctccactctccctgcccgtcacccctggagagtcggcctccatctcctgcaggtctagtcagagcctcctgcatagtaatggatacaactatttggattggtacgtgcagaagccagggcagtctccacagctcctgatctatttggcttctaatcgggcctccggggtccctgacaggttcagtggcagtggatcaggcacagattttacactgaaaatcagcagagtggaggctgaggatgttggggtttattactgcatgcaagctctacaaactccgtacacttttggccaggggaccaagctggagatcaaac

SEQ ID NO: 2661 - protein, 112 aa, Artificial Sequence
  Description of Artificial Sequence: Synthetic polypeptide
DIVMTQSPLSLPVTPGESASISCRSSQSLLHSNGYNYLDWYVQKPGQSPQLLIYLASNRASGVPDRFSGSGSGTDFTLKISRVEAEDVGVYYCMQALQTPYTFGQGTKLEIK

SEQ ID NO: 2662 - protein, 9 aa, Artificial Sequence
  Description of Artificial Sequence: Synthetic peptide
MQALQTPYT

SEQ ID NO: 2663 - DNA, 358 bp, Artificial Sequence
  Description of Artificial Sequence: Synthetic polynucleotide
caggtgcagctggtggagtctgggggaggcgtggtccagcctgggaggtccctgagactttcctgtgcagcctctggattcacttttagtagttatcatatggactgggtccgccaggctccaggcaaggggctggagtgggtggcaattatctcagatgatggaagtaataaatactacccagattccgtgaagggccgattcaccatctccagagacaattccaggaacaccctgtatctacaagtgaacagcctgagagctgaggacacggctatttattactgtgcgcgagatcgggggtatagtaatggctttgacctctggggccagggaaccctggtcaccgtctcctcag

SEQ ID NO: 2664 - protein, 119 aa, Artificial Sequence
  Description of Artificial Sequence: Synthetic polypeptide
QVQLVESGGGVVQPGRSLRLSCAASGFTFSSYHMDWVRQAPGKGLEWVAIISDDGSNKYYPDSVKGRFTISRDNSRNTLYLQVNSLRAEDTAIYYCARDRGYSNGFDLWGQGTLVTVSS

SEQ ID NO: 2665 - protein, 12 aa, Artificial Sequence
  Description of Artificial Sequence: Synthetic peptide
ARDRGYSNGFDL

SEQ ID NO: 2666 - DNA, 322 bp, Artificial Sequence
  Description of Artificial Sequence: Synthetic polynucleotide
gaaatagtgatgacgcagtctccagccaccctgtctgtgtctccaggggaaagtgccaccctctcctgcagggccagtcagagtgttaccagtaacttagcctggtaccagcagaaagcgggccaggctcccaggctcctcatctatggtgcatccaccagggccactggtatcccagccaggttcagtggcagtgggtctgggacagagttcactctcaccatcagcaccctgcagtctgaagattttgcagtttattactgtcagcagtataataactggccgctcactttcggcggagggaccaaggtggagatcaaac

SEQ ID NO: 2667 - protein, 107 aa, Artificial Sequence
  Description of Artificial Sequence: Synthetic polypeptide
EIVMTQSPATLSVSPGESATLSCRASQSVTSNLAWYQQKAGQAPRLLIYGASTRATGIPARFSGSGSGTEFTLTISTLQSEDFAVYYCQQYNNWPLTFGGGTKVEIK

SEQ ID NO: 2668 - protein, 9 aa, Artificial Sequence
  Description of Artificial Sequence: Synthetic peptide
QQYNNWPLT

SEQ ID NO: 2669 - DNA, 367 bp, Artificial Sequence
  Description of Artificial Sequence: Synthetic polynucleotide
caggtgcagctggtgcagtctggggctgaagtgaagaagcctgggtcctcggtgaaggtctcctgcaaggcttctggaggcaccttcagtagttttgcgatcagttgggtgcgacaggcccctggacaaggccttgagtggatgggagggatcactcctatttttggagcaccaaattacgcacagaagttccgggacagagtcacgataaccgcggacgaatcaacgaccacagtctacatggaggtgagcggcctgagatctgacgacacggccgtgtattactgtgcgagagatcttgataacactggctggtacgggggtttgtcgacctggggccagggaaccctggtcatcgtctcctcag

SEQ ID NO: 2670 - protein, 122 aa, Artificial Sequence
  Description of Artificial Sequence: Synthetic polypeptide
QVQLVQSGAEVKKPGSSVKVSCKASGGTFSSFAISWVRQAPGQGLEWMGGITPIFGAPNYAQKFRDRVTITADESTTTVYMEVSGLRSDDTAVYYCARDLDNTGWYGGLSTWGQGTLVIVSS

SEQ ID NO: 2671 - protein, 15 aa, Artificial Sequence
  Description of Artificial Sequence: Synthetic peptide
ARDLDNTGWYGGLST

SEQ ID NO: 2672 - DNA, 322 bp, Artificial Sequence
  Description of Artificial Sequence: Synthetic polynucleotide
gaaattgtgttgacacagtctccagccaccctgtctttgtctccaggggaaagagccaccctctcctgcagggccagtcagagtgttagcacctacttagcctggtaccaacagaaacctggccaggctcccaggctcctcatccatgatgcttctaacagggccactggcatcccagccaggttcagtggcagtgggtctgggacagacttcactctcaccatcagcagcctagagcctgaagattttgcagtttattactgtcagcagcgtcgcagctggcctcacacttttggccaggggaccaagctggatatcaaac

SEQ ID NO: 2673 - protein, 107 aa, Artificial Sequence
  Description of Artificial Sequence: Synthetic polypeptide
EIVLTQSPATLSLSPGERATLSCRASQSVSTYLAWYQQKPGQAPRLLIHDASNRATGIPARFSGSGSGTDFTLTISSLEPEDFAVYYCQQRRSWPHTFGQGTKLDIK

SEQ ID NO: 2674 - protein, 9 aa, Artificial Sequence
  Description of Artificial Sequence: Synthetic peptide
QQRRSWPHT

SEQ ID NO: 2675 - DNA, 375 bp, Artificial Sequence
  Description of Artificial Sequence: Synthetic polynucleotide
gaggtgcagctggtggagtctgggggaggcttggttcagcctggagggtccctgagactctcttgtgcagcctcggaattcaccttcaaggaatatgaaatgatttgggtccgccaggctccagggacggggctggagtggatttcgaaaattagtggtaatggtcgagccgtttactacgcagactctgtgaagggccgattcaccatctccagagacaacaccaagaactcattgtatctgcaaatgaccagcctgagagccgaagacacggctgtttattattgtgcgagagatcgtaacgatttttggagtgggatttggtactacggaatagacgtctggggccacgggaccacggtcaccgtctcctca

SEQ ID NO: 2676 - protein, 125 aa, Artificial Sequence
  Description of Artificial Sequence: Synthetic polypeptide
EVQLVESGGGLVQPGGSLRLSCAASEFTFKEYEMIWVRQAPGTGLEWISKISGNGRAVYYADSVKGRFTISRDNTKNSLYLQMTSLRAEDTAVYYCARDRNDFWSGIWYYGIDVWGHGTTVTVSS

SEQ ID NO: 2677 - protein, 18 aa, Artificial Sequence
  Description of Artificial Sequence: Synthetic peptide
ARDRNDFWSGIWYYGIDV

SEQ ID NO: 2678 - DNA, 337 bp, Artificial Sequence
  Description of Artificial Sequence: Synthetic polynucleotide
  modified_base (37)..(37): a, c, t, g, unknown or other
gatattgtgatgactcagtctccactctccctgcccntcacccctggagagccggcctccatctcctgcaggtctagtcagagcctcctgcatgctaatggatacaactatttggattggtacctgcagaagccagggcagtctccacaactcctgatctatatgggttctaatcgggcctccggggtccctgacaggttcagtggcagtggatcaggcacagattttacactgaaaatcaccagagtggaggctgaggatgttggggtttattactgcatgcaagctctacaaaccccgtacagttttggccaggggacgaagctggagatcaaac

SEQ ID NO: 2679 - protein, 112 aa, Artificial Sequence
  Description of Artificial Sequence: Synthetic polypeptide
  MOD_RES (13)..(13): Any amino acid
DIVMTQSPLSLPXTPGEPASISCRSSQSLLHANGYNYLDWYLQKPGQSPQLLIYMGSNRASGVPDRFSGSGSGTDFTLKITRVEAEDVGVYYCMQALQTPYSFGQGTKLEIK

SEQ ID NO: 2680 - protein, 9 aa, Artificial Sequence
  Description of Artificial Sequence: Synthetic peptide
MQALQTPYS

SEQ ID NO: 2681 - DNA, 348 bp, Artificial Sequence
  Description of Artificial Sequence: Synthetic polynucleotide
caggtgcagctggtggagtctgggggaggcgtggtccagcctgggaggtccctgagactctcctgttcagcctctggattcaccttcagtcactatggtttccactgggtccgccaggctccaggcaaggggctgcaatgggtggcatttatatcatttgatggaacctataagcactacgcagactccttgaagggccgattcaccatctccagagacaattccaagaacacactgtttttgcaaatgaacagcctgagagctgaagacacggctatttattactgtgcgagatccggtcacggcgtggacgtctggggccaagggaccacggtcaccgtctcctca

SEQ ID NO: 2682 - protein, 116 aa, Artificial Sequence
  Description of Artificial Sequence: Synthetic polypeptide
QVQLVESGGGVVQPGRSLRLSCSASGFTFSHYGFHWVRQAPGKGLQWVAFISFDGTYKHYADSLKGRFTISRDNSKNTLFLQMNSLRAEDTAIYYCARSGHGVDVWGQGTTVTVSS

SEQ ID NO: 2683 - protein, 9 aa, Artificial Sequence
  Description of Artificial Sequence: Synthetic peptide
ARSGHGVDV

SEQ ID NO: 2684 - DNA, 335 bp, Artificial Sequence
  Description of Artificial Sequence: Synthetic polynucleotide
  modified_base (25)..(26): a, c, t, g, unknown or other
  modified_base (28)..(28): a, c, t, g, unknown or other
gatattgtgatgactcagtctccanncnccctgcccgtcacccctggagagccggcctccatctcctgcaggtctagtcagagcctccttcatagcaatggatacaactatttgaattggtacctgcagaagccagggcagtctccacaggtcctgatctatttgggttctaatcgggcctccggggtccctgacaggttcagtggcagtggatcaggcacagattttacactgaaaatcagcagagtggaggctgaggatgttggggtttattactgcatgcaagctctacaaactacgtggacgttcggccaagggaccacggtggaaatcaa

SEQ ID NO: 2685 - protein, 111 aa, Artificial Sequence
  Description of Artificial Sequence: Synthetic polypeptide
  MOD_RES (9)..(10): Any amino acid
DIVMTQSPXXLPVTPGEPASISCRSSQSLLHSNGYNYLNWYLQKPGQSPQVLIYLGSNRASGVPDRFSGSGSGTDFTLKISRVEAEDVGVYYCMQALQTTWTFGQGTTVEI

SEQ ID NO: 2686 - protein, 9 aa, Artificial Sequence
  Description of Artificial Sequence: Synthetic peptide
MQALQTTWT

SEQ ID NO: 2687 - DNA, 355 bp, Artificial Sequence
  Description of Artificial Sequence: Synthetic polynucleotide
caggtgcagctggtgcagtctggggctgaggtgaagaagcctgggtcctcggtgaaagtctcctgcaaggcttctggaggcaccttcagcaactttgccatccactgggtgcgacaggcccctgggcacgggcttgagtggatgggacggatcctccctttctttggtacaccagactccgcgcagaggttccagggcagagtcacgattaccgcggacgaatccacgagcacagcctacatggagctgagcagcctgagatctgaggacacggccctctattactgtgcgagagaggggggggaagggtcctttgactactggggccacggaaccctggtcaccgtctcctcag

SEQ ID NO: 2688 - protein, 118 aa, Artificial Sequence
  Description of Artificial Sequence: Synthetic polypeptide
QVQLVQSGAEVKKPGSSVKVSCKASGGTFSNFAIHWVRQAPGHGLEWMGRILPFFGTPDSAQRFQGRVTITADESTSTAYMELSSLRSEDTALYYCAREGGEGSFDYWGHGTLVTVSS

SEQ ID NO: 2689 - protein, 11 aa, Artificial Sequence
  Description of Artificial Sequence: Synthetic peptide
AREGGEGSFDY

SEQ ID NO: 2690 - DNA, 337 bp, Artificial Sequence
  Description of Artificial Sequence: Synthetic polynucleotide
gatattgtgatgactcagtctccactctccctgcccgtcacccctggagagccggcctccatctcctgcaagtctagtcagagcctcctgcatagggatggaaacaactatttggattggtacctgcagaagccagggcagtctccaaagctcctgatctatttgggttctaatcgggcctccggggtccctgacaggttccgtggcattggatcaggcacagattttacactgaaaatcagcagagtggaggctgaggatgttggcgtttattactgcatgcaagctctacagactcctcggacgttcggccaagggaccaaggtggaaatcaaac

SEQ ID NO: 2691 - protein, 112 aa, Artificial Sequence
  Description of Artificial Sequence: Synthetic polypeptide
DIVMTQSPLSLPVTPGEPASISCKSSQSLLHRDGNNYLDWYLQKPGQSPKLLIYLGSNRASGVPDRFRGIGSGTDFTLKISRVEAEDVGVYYCMQALQTPRTFGQGTKVEIK

SEQ ID NO: 2692 - protein, 9 aa, Artificial Sequence
  Description of Artificial Sequence: Synthetic peptide
MQALQTPRT

SEQ ID NO: 2693 - DNA, 358 bp, Artificial Sequence
  Description of Artificial Sequence: Synthetic polynucleotide
caggtgcagctggtggagtctgggggaggcgtggtccagcctggggggtccctgagactctcctgtgaagcctctggattcacattcaataaatataatatggactgggtccgccaggctccaggcaaggggctggagtgggtggcaattatttcagatgatggaagtaatgaatactatccagagtctgtgcggggccgattcaccatctccagagacaattcccagaacacgctgtatctgcaaatgaacatcttgacaactgacgacacggctgtttattactgtgtgagagatcggggatacagctctgctttcgactactggggacaggggtccctggtcatcgtctcctcag

SEQ ID NO: 2694 - protein, 119 aa, Artificial Sequence
  Description of Artificial Sequence: Synthetic polypeptide
QVQLVESGGGVVQPGGSLRLSCEASGFTFNKYNMDWVRQAPGKGLEWVAIISDDGSNEYYPESVRGRFTISRDNSQNTLYLQMNILTTDDTAVYYCVRDRGYSSAFDYWGQGSLVIVSS

SEQ ID NO: 2695 - protein, 12 aa, Artificial Sequence
  Description of Artificial Sequence: Synthetic peptide
VRDRGYSSAFDY

SEQ ID NO: 2696 - DNA, 322 bp, Artificial Sequence
  Description of Artificial Sequence: Synthetic polynucleotide
gaaatagtgatgacgcagtctccagccaccctgtctgtgtctccagggggaagagccaccctctcctgcggggccagtcagactattggcaccaacttagcctggtatcagcagaaacgtgagcagactcccaggctcctcatctatgatgcttccactagggccactggtgtcccagccaggttcagtggcagtgggtctgggacaaagttcactctcaccatcagcagcctgcagtctgaagattttggagtttattactgtcagcagtatgatttctggcctctcactttcggcggagggaccaaggtggagatcaaac

SEQ ID NO: 2697 - protein, 107 aa, Artificial Sequence
  Description of Artificial Sequence: Synthetic polypeptide
EIVMTQSPATLSVSPGGRATLSCGASQTIGTNLAWYQQKREQTPRLLIYDASTRATGVPARFSGSGSGTKFTLTISSLQSEDFGVYYCQQYDFWPLTFGGGTKVEIK

SEQ ID NO: 2698 - protein, 9 aa, Artificial Sequence
  Description of Artificial Sequence: Synthetic peptide
QQYDFWPLT

SEQ ID NO: 2699 - DNA, 350 bp, Artificial Sequence
  Description of Artificial Sequence: Synthetic polynucleotide
caggtgcagctggtgcagtctggggctgaggtgaagaagcctgggtcctcggtgaaggtctcctgcaaggcttctggattcaccttcaacaactttgcaatcgcctgggtgcgacaggcccctggacaagggcttgagtggatgggagggatcatccccatttttggtacaccaaactacgcacagaagttccagggcagagtgaagattagcgcggacaagttcacgagcacagcctatatggaggtgatcagcctgagatctgacgacacggccgtgtatttctgtgcgagagaagacgggcttgggagttacggggactggggccagggaaccctcgtcaccgtctc

SEQ ID NO: 2700 - protein, 116 aa, Artificial Sequence
  Description of Artificial Sequence: Synthetic polypeptide
QVQLVQSGAEVKKPGSSVKVSCKASGFTFNNFAIAWVRQAPGQGLEWMGGIIPIFGTPNYAQKFQGRVKISADKFTSTAYMEVISLRSDDTAVYFCAREDGLGSYGDWGQGTLVTV

SEQ ID NO: 2701 - protein, 11 aa, Artificial Sequence
  Description of Artificial Sequence: Synthetic peptide
AREDGLGSYGD

SEQ ID NO: 2702 - DNA, 337 bp, Artificial Sequence
  Description of Artificial Sequence: Synthetic polynucleotide
gatattgtgatgactcagtctccactctccctgcccgtcacccctggagagccggcctccatctcctgcaggtctagtcagagcctcctgcatagtaatggatacaactatgtggattggtacctgcagaagccagggcagtctccacagctcctgatctatttgggctctaatcgggcctccggggtccctgacaggttcagtggcagtggatcaggcgcagattttacactgaaaatcagcagagtggaggctgaggatgttggggtttattactgcatgcaggctctacaaactcctaagacttttggccaggggaccaagctggatatcaaac

SEQ ID NO: 2703 - protein, 112 aa, Artificial Sequence
  Description of Artificial Sequence: Synthetic polypeptide
DIVMTQSPLSLPVTPGEPASISCRSSQSLLHSNGYNYVDWYLQKPGQSPQLLIYLGSNRASGVPDRFSGSGSGADFTLKISRVEAEDVGVYYCMQALQTPKTFGQGTKLDIK

SEQ ID NO: 2704 - protein, 9 aa, Artificial Sequence
  Description of Artificial Sequence: Synthetic peptide
MQALQTPKT

SEQ ID NO: 2705 - DNA, 347 bp, Artificial Sequence
  Description of Artificial Sequence: Synthetic polynucleotide
caggtgcagctggtgcagtctggggctgaagtgaagaagcctgggtcttcggtgaaggtctcctgcaaggcttctggaggcaccttcagcaactatgctatcagctgggtgcgacaggcccctggacaagggcttgagtggatgggagagatcatccctgtctttggtacaccaacgtacgcacagaagttccagggcagagtcacaattaccgcggacgaatcttcgagaacagcctacatggaggtgaacagactgagatctgacgacacggccgtgtattactgtgcgagaggcgtttggggatttgactactggggccagggaaccctggtcaccgtctcctc

SEQ ID NO: 2706 - protein, 115 aa, Artificial Sequence
  Description of Artificial Sequence: Synthetic polypeptide
QVQLVQSGAEVKKPGSSVKVSCKASGGTFSNYAISWVRQAPGQGLEWMGEIIPVFGTPTYAQKFQGRVTITADESSRTAYMEVNRLRSDDTAVYYCARGVWGFDYWGQGTLVTVS

SEQ ID NO: 2707 - protein, 9 aa, Artificial Sequence
  Description of Artificial Sequence: Synthetic peptide
ARGVWGFDY

SEQ ID NO: 2708 - DNA, 322 bp, Artificial Sequence
  Description of Artificial Sequence: Synthetic polynucleotide
gaaattgtgttgacgcagtctccaggcaccctgtctttgtctccaggggagagagccaccctctcctgcagggccagtcagagtgttgacagcagctacttagcctggtaccaacagagacctggccaggctcccaggctcctcatctatggtgcatccaccagggccactggcatcccagacaggttcagtggcagtgggtctgggacagacttcactctcaccatcagcagactggagcctgacgattttgcagtgtattactgtcatcactatggtacctcacgaacttttggcctggggaccaagctggagatcaaac

SEQ ID NO: 2709 - protein, 107 aa, Artificial Sequence
  Description of Artificial Sequence: Synthetic polypeptide
EIVLTQSPGTLSLSPGERATLSCRASQSVDSSYLAWYQQRPGQAPRLLIYGASTRATGIPDRFSGSGSGTDFTLTISRLEPDDFAVYYCHHYGTSRTFGLGTKLEIK

SEQ ID NO: 2710 - protein, 8 aa, Artificial Sequence
  Description of Artificial Sequence: Synthetic peptide
HHYGTSRT

SEQ ID NO: 2711 - DNA, 358 bp, Artificial Sequence
  Description of Artificial Sequence: Synthetic polynucleotide
gaagtgcagctggtgcagtccggagcagaggtgagaaagcccggggagtctctgaggatctcctgtaagggttctggatacaccttcacccactactggatcacctgggtgcgccagatgcccgggaaaggcctggagtggatggggaggattgatcctagtgactctcgaaccacctacagcccgtccttccaaggccacgtctccttctcagttgacaagtccatcaacactgcctacctgcagtggagccgcctgaaggcctcggacaccgccatttattactgtgcgagactaggaggcatagcagcggctcttgactactggggccagggaaccctggtcaccgtctcgtcag

SEQ ID NO: 2712 - protein, 119 aa, Artificial Sequence
  Description of Artificial Sequence: Synthetic polypeptide
EVQLVQSGAEVRKPGESLRISCKGSGYTFTHYWITWVRQMPGKGLEWMGRIDPSDSRTTYSPSFQGHVSFSVDKSINTAYLQWSRLKASDTAIYYCARLGGIAAALDYWGQGTLVTVSS

SEQ ID NO: 2713 - protein, 12 aa, Artificial Sequence
  Description of Artificial Sequence: Synthetic peptide
ARLGGIAAALDY

SEQ ID NO: 2714 - DNA, 317 bp, Artificial Sequence
  Description of Artificial Sequence: Synthetic polynucleotide
gacatccagatgacccagtctccatcctccctgtctgcatctgtaggagacagagtcaccattacttgccaggcgagtcaggacattagcgaccacttaaattggtatcagcagaaaccagggaaagcccctaaactcctgatctttgatgcatccaatttggatacaggggtcccatcaacgttcagtggaagtggatctgggacatattttactctcaccatcagcagcctgcagcctgaagatgttgcggcatattactgtcaacagtatgacaatctcccgtggacgttcggccaagggaccacggtggaaat

SEQ ID NO: 2715 - protein, 105 aa, Artificial Sequence
  Description of Artificial Sequence: Synthetic polypeptide
DIQMTQSPSSLSASVGDRVTITCQASQDISDHLNWYQQKPGKAPKLLIFDASNLDTGVPSTFSGSGSGTYFTLTISSLQPEDVAAYYCQQYDNLPWTFGQGTTVE

SEQ ID NO: 2716 - protein, 9 aa, Artificial Sequence
  Description of Artificial Sequence: Synthetic peptide
QQYDNLPWT

SEQ ID NO: 2717 - DNA, 358 bp, Artificial Sequence
  Description of Artificial Sequence: Synthetic polynucleotide
caggtgcagctggtgcagtctggggctgaggtgaagaagcctgggtcttcggtgaaggtctcctgcaagacttctggaggccccttcaacaactatcctatcaactgggtgcgacaggcccctggacaagggcttgagtggatgggacgaatcatccctacctttggtacagcaaactacgcacagaaattccagggcagagtcacgattaccgcggacaaatccacgagcacagcctacatggagctgaatagcctgagatctgcggacacggccgtgtattactgtgcgagagatggtgggactagtggttctcttgactactggggccagggaaccctggtcatcgtctcctcag

SEQ ID NO: 2718 - protein, 119 aa, Artificial Sequence
  Description of Artificial Sequence: Synthetic polypeptide
QVQLVQSGAEVKKPGSSVKVSCKTSGGPFNNYPINWVRQAPGQGLEWMGRIIPTFGTANYAQKFQGRVTITADKSTSTAYMELNSLRSADTAVYYCARDGGTSGSLDYWGQGTLVIVSS

SEQ ID NO: 2719 - protein, 12 aa, Artificial Sequence
  Description of Artificial Sequence: Synthetic peptide
ARDGGTSGSLDY

SEQ ID NO: 2720 - DNA, 337 bp, Artificial Sequence
  Description of Artificial Sequence: Synthetic polynucleotide
gatattgtgatgactcagtctccactctccctgcccgtcacccctggagagccggcctccatctcctgcaggtctagtcagagcctcctgcatagtaatggatacaactatttggattggtacctgcagaagccagggcagtctccacagctcctgatctatttgggttctaatcgggcctccggggtccctgacaggttcagtggcagtggatcaggcacagattttacactgaaaatcagtagagtggaggctgaggatgttggggtttattactgcatgcaagctctacaaactccgctcactttcggcggagggaccaaggtggagatcaaac

SEQ ID NO: 2721 - protein, 112 aa, Artificial Sequence
  Description of Artificial Sequence: Synthetic polypeptide
DIVMTQSPLSLPVTPGEPASISCRSSQSLLHSNGYNYLDWYLQKPGQSPQLLIYLGSNRASGVPDRFSGSGSGTDFTLKISRVEAEDVGVYYCMQALQTPLTFGGGTKVEIK

SEQ ID NO: 2722 - protein, 9 aa, Artificial Sequence
  Description of Artificial Sequence: Synthetic peptide
MQALQTPLT

SEQ ID NO: 2723 - DNA, 349 bp, Artificial Sequence
  Description of Artificial Sequence: Synthetic polynucleotide
caggtgcagctggtgcagtctggggctgaggtgaagaagcctgagtcctcggtgaaggtctcctgcaaggcttctggaggcaccttcagtcactttcctattagctgggtgcgacaggcccctggacaagggcttgagtggttgggagggatcatccccatcttcagaacaacaaactacgcacagaagttccagggcagagtcacgattaccgcggacgaatccacgagtacagcctacatggagctgagcagcctgacatctgaggacacggccgtgtattactgtgcgacaggatacagctatggagactattggggccagggaaccctggtcaccgtctcctcag

SEQ ID NO: 2724 - protein, 116 aa, Artificial Sequence
  Description of Artificial Sequence: Synthetic polypeptide
QVQLVQSGAEVKKPESSVKVSCKASGGTFSHFPISWVRQAPGQGLEWLGGIIPIFRTTNYAQKFQGRVTITADESTSTAYMELSSLTSEDTAVYYCATGYSYGDYWGQGTLVTVSS

SEQ ID NO: 2725 - protein, 9 aa, Artificial Sequence
  Description of Artificial Sequence: Synthetic peptide
ATGYSYGDY

SEQ ID NO: 2726 - DNA, 322 bp, Artificial Sequence
  Description of Artificial Sequence: Synthetic polynucleotide
gacatccagatgacccagtctccatcctccctgtctgcatctgtaggagacagagtcaccatcacttgtcaggcgagtcaggacattaccaagtacttaagttggtatcagcagaaaccagggaaagcccctaagctcctgatctacgatgcatccaatttggaaacaggggtcccatcaaggttcagtggaagtggatctgggacacattttaccttcaccatcagcagcctgcagcctgaagatattgcgacctattactgtcaacactatgataatctaccctcgctcactttcggcggagggaccaaggtggagctca

SEQ ID NO: 2727 - protein, 107 aa, Artificial Sequence
  Description of Artificial Sequence: Synthetic polypeptide
DIQMTQSPSSLSASVGDRVTITCQASQDITKYLSWYQQKPGKAPKLLIYDASNLETGVPSRFSGSGSGTHFTFTISSLQPEDIATYYCQHYDNLPSLTFGGGTKVEL

SEQ ID NO: 2728 - protein, 10 aa, Artificial Sequence
  Description of Artificial Sequence: Synthetic peptide
QHYDNLPSLT

SEQ ID NO: 2729 - DNA, 355 bp, Artificial Sequence
  Description of Artificial Sequence: Synthetic polynucleotide
caggtgcagctggtgcagtctggggctgaggtgaagaagcctgggtcctcggtgagggtctcctgcaaggtttctggaggcaccttcagcacctatgctatcaactgggtgcgacaggcccctggacaaggtcttgagtggatgggagggatcatccctgtctttggtacacccaattacgcacagaaattccagggcagagtcacaattaccgcggatgaatctgcgaggacagcctacatggagctgagcagcctgagatctgaggacacggccgtcttttattgtgcgagagatgggggtgcaaatccccttgactactggggccagggaaccctggtcaccgtctcttcag

SEQ ID NO: 2730 - protein, 118 aa, Artificial Sequence
  Description of Artificial Sequence: Synthetic polypeptide
QVQLVQSGAEVKKPGSSVRVSCKVSGGTFSTYAINWVRQAPGQGLEWMGGIIPVFGTPNYAQKFQGRVTITADESARTAYMELSSLRSEDTAVFYCARDGGANPLDYWGQGTLVTVSS

SEQ ID NO: 2731 - protein, 11 aa, Artificial Sequence
  Description of Artificial Sequence: Synthetic peptide
ARDGGANPLDY

SEQ ID NO: 2732 - DNA, 337 bp, Artificial Sequence
  Description of Artificial Sequence: Synthetic polynucleotide
gatattgtgatgactcagtctccactctccctgcccgtcacccctggagagccggcctccatctcctgcaggtctagtcagagcctcctccatagtaatggatacaactatttgaattggtacctgcagaaaccagggcagtctccacagctcctgctctatttgggttctgatcgggcctccggggtccctgacaggttcagtggcagtggatcaggcacagattttacactgaaaatcagcagagtggaggctgaggatgttggggtttattactgcatgcaagctctacgggctccgtacgcttttggccaggggaccaagctggagatcaaac

SEQ ID NO: 2733 - protein, 112 aa, Artificial Sequence
  Description of Artificial Sequence: Synthetic polypeptide
DIVMTQSPLSLPVTPGEPASISCRSSQSLLHSNGYNYLNWYLQKPGQSPQLLLYLGSDRASGVPDRFSGSGSGTDFTLKISRVEAEDVGVYYCMQALRAPYAFGQGTKLEIK

SEQ ID NO: 2734 - protein, 9 aa, Artificial Sequence
  Description of Artificial Sequence: Synthetic peptide
MQALRAPYA

SEQ ID NO: 2735 - DNA, 363 bp, Artificial Sequence
  Description of Artificial Sequence: Synthetic polynucleotide
caggtgcagctggtggagtctgggggaggcgtggtccggcctgggaggtccctgagactctcgtgtgcagcctctggcttcagattcagtaactatgcaatgcactgggtccgccaggccccaggcaaggggctggagtgggtcgcagttatttcagacgatggaagccaaatagaatatgggaattccgtaaagggccgattcaccgtctccagagacaattccaggaccacgctctatttgcaagcgagcagcctgagagttgacgacacggctatatattactgtgcgaaggacggcagtggctgggtggacaactggctcgactcctggggccagggaaccctggtcaccgtctcctca

SEQ ID NO: 2736 - protein, 121 aa, Artificial Sequence
  Description of Artificial Sequence: Synthetic polypeptide
QVQLVESGGGVVRPGRSLRLSCAASGFRFSNYAMHWVRQAPGKGLEWVAVISDDGSQIEYGNSVKGRFTVSRDNSRTTLYLQASSLRVDDTAIYYCAKDGSGWVDNWLDSWGQGTLVTVSS

SEQ ID NO: 2737 - protein, 14 aa, Artificial Sequence
  Description of Artificial Sequence: Synthetic peptide
AKDGSGWVDNWLDS

SEQ ID NO: 2738 - DNA, 322 bp, Artificial Sequence
  Description of Artificial Sequence: Synthetic polynucleotide
gaaatagtgatgacgcagtctccagccaccctgtctgtgtctccaggggaaagagccaccctctcctgcagggccagccagagtgttaccagcaacttagcctggtaccagcagaaacctgggcaggctcccaggctcctcatctatggtgcgtccaccagggccactggtatcccagccaggttcagtggcagtgggtctgggacagacttcactctcaccatcagcagcctgcagtctgaagattttgcagtttattactgtcagcagtataataattggcccctcactttcggcggagggaccaaggtggagatcaaac

SEQ ID NO: 2739 - protein, 107 aa, Artificial Sequence
  Description of Artificial Sequence: Synthetic polypeptide
EIVMTQSPATLSVSPGERATLSCRASQSVTSNLAWYQQKPGQAPRLLIYGASTRATGIPARFSGSGSGTDFTLTISSLQSEDFAVYYCQQYNNWPLTFGGGTKVEIK

SEQ ID NO: 2740 - protein, 9 aa, Artificial Sequence
  Description of Artificial Sequence: Synthetic peptide
QQYNNWPLT

SEQ ID NO: 2741 - DNA, 355 bp, Artificial Sequence
  Description of Artificial Sequence: Synthetic polynucleotide
caggtgcagctggtgcagtctggggctgaggtgaagaagcctgggtcctcggtgaaggtctcctgcaaggcttctggaggcacctttagtacctttgaaatcagctgggtgcgacaggcccctggactaggacttgagtggatgggagggatcatccctgtctttggctcaccaacctacgcacagcagttccacggcagagtcacaattaccgcggacgaatccacgaccacagcctacatggagttgaggagtctgagatctgaagacacggccgtctattactgtgcgagagtggacggtttagggagccatgacaactggggccagggaaccctggtcatcgtctccgcag

SEQ ID NO: 2742 - protein, 118 aa, Artificial Sequence
  Description of Artificial Sequence: Synthetic polypeptide
QVQLVQSGAEVKKPGSSVKVSCKASGGTFSTFEISWVRQAPGLGLEWMGGIIPVFGSPTYAQQFHGRVTITADESTTTAYMELRSLRSEDTAVYYCARVDGLGSHDNWGQGTLVIVSA

SEQ ID NO: 2743 - protein, 11 aa, Artificial Sequence
  Description of Artificial Sequence: Synthetic peptide
ARVDGLGSHDN

SEQ ID NO: 2744 - DNA, 337 bp, Artificial Sequence
  Description of Artificial Sequence: Synthetic polynucleotide
gatattgtgatgactcagtctccactctccctgcccgtcacccctggagagccggcctccatctcctgcaggtctagtcagagcctcctgcatcgtgatggatcccactatttggattggtacctgcagaagccagggcagtctccacagctcctgatctatttgggttctaatcgggcctccggggtccctgacaggttcagtggcagtggatcaggcacagattttacactgaaaatcagcagagtggaggctgaggatgttggggtttattactgcatgcaaactctacaaactcctcggacgttcggccaagggaccaaggtggaaatcaaac

SEQ ID NO: 2745 - protein, 112 aa, Artificial Sequence
  Description of Artificial Sequence: Synthetic polypeptide
DIVMTQSPLSLPVTPGEPASISCRSSQSLLHRDGSHYLDWYLQKPGQSPQLLIYLGSNRASGVPDRFSGSGSGTDFTLKISRVEAEDVGVYYCMQTLQTPRTFGQGTKVEIK

SEQ ID NO: 2746 - protein, 9 aa, Artificial Sequence
  Description of Artificial Sequence: Synthetic peptide
MQTLQTPRT

SEQ ID NO: 2747 - DNA, 346 bp, Artificial Sequence
  Description of Artificial Sequence: Synthetic polynucleotide
caggttcagctggtgcagtctggacctgaggtgaagaagcttggggcctcagtgaaggtctcctgcaaggcctcaggttacacctttacgcactatggtattcactgggtgcgacagacccctggacaaggccttgagtggatgggatggatcagcgtttacaatggtaacacaaactatgcacagaacttccagggcagagtcaccatgaccacagacacatccacgaacacagcctacatggagctgaggagcctgagatctgacgacacggccgtctattactgtgtgagagcgacttggttcgacccctggggccagggaaccctggtcaccgtctcctcag

SEQ ID NO: 2748 - protein, 115 aa, Artificial Sequence
  Description of Artificial Sequence: Synthetic polypeptide
QVQLVQSGPEVKKLGASVKVSCKASGYTFTHYGIHWVRQTPGQGLEWMGWISVYNGNTNYAQNFQGRVTMTTDTSTNTAYMELRSLRSDDTAVYYCVRATWFDPWGQGTLVTVSS

SEQ ID NO: 2749 - protein, 8 aa, Artificial Sequence
  Description of Artificial Sequence: Synthetic peptide
VRATWFDP

SEQ ID NO: 2750 - DNA, 322 bp, Artificial Sequence
  Description of Artificial Sequence: Synthetic polynucleotide
gacatccagatgacccagtctccatcctccctgtctgcatctgtaggagacagagtcaccatcacttgccaggcgaaacaggacattaagaactatttaaattggtatcagcagaaaccagggaaagcccctaagctcctgatctccgatgcatccaatttggaaacaggggtcccatcaaggttcagtggaagtggatctgggacagattttactttcaccatcagcagcctgcagcctgaagatattgcaacatattactgtcaacagtatgataatctcctttggacgttcggccaagggaccaaggtggaactcaaac

SEQ ID NO: 2751 - protein, 107 aa, Artificial Sequence
  Description of Artificial Sequence: Synthetic polypeptide
DIQMTQSPSSLSASVGDRVTITCQAKQDIKNYLNWYQQKPGKAPKLLISDASNLETGVPSRFSGSGSGTDFTFTISSLQPEDIATYYCQQYDNLLWTFGQGTKVELK

SEQ ID NO: 2752 - protein, 9 aa, Artificial Sequence
  Description of Artificial Sequence: Synthetic peptide
QQYDNLLWT

SEQ ID NO: 2753 - DNA, 352 bp, Artificial Sequence
  Description of Artificial Sequence: Synthetic polynucleotide
caggtgcagctggtgcagtctggggctgaggtgaagaagcctgggtcctcggtgaaggtctcctgtaaggcttctggatacatcttcaacaaccatgctatcaattgggtgcgacaggcccctggacaagggcttgaatggatgggagacatcatccctatctttggtacaccaaactacgcacagaagttccaaggcagagtcactattaccgcggacaaatccacgagcacagcctacatggacttgagtagcctgagatttgaggacacggccttttattattgtgcgagagatggggattccctccttgactactggggccagggaaccctggtcaccgtctcctcag

SEQ ID NO: 2754 - protein, 117 aa, Artificial Sequence
  Description of Artificial Sequence: Synthetic polypeptide
QVQLVQSGAEVKKPGSSVKVSCKASGYIFNNHAINWVRQAPGQGLEWMGDIIPIFGTPNYAQKFQGRVTITADKSTSTAYMDLSSLRFEDTAFYYCARDGDSLLDYWGQGTLVTVSS

SEQ ID NO: 2755 - protein, 10 aa, Artificial Sequence
  Description of Artificial Sequence: Synthetic peptide
ARDGDSLLDY

SEQ ID NO: 2756 - DNA, 337 bp, Artificial Sequence
  Description of Artificial Sequence: Synthetic polynucleotide
gatgttgtgatgactcagtctccactctccctgcccgtcacccttggacagccggcctccatctcctgcaggtctagtcaaagcctcgtttaccgtgatggaaacacctacttgaattggtttcatcagaggccaggccaatctccaaggcgcctaatttacaaagtttctaaccgggactctggggtcccagacagattcagcggcagtgggtcaggcactgatttcacactgaaaatcagcagggtggaggctgaggatgttggggtttatttctgcatgcaaggtacacactggcctcgaacttttggccaggggaccaagctggagatcaaac

SEQ ID NO: 2757 - protein, 112 aa, Artificial Sequence
  Description of Artificial Sequence: Synthetic polypeptide
DVVMTQSPLSLPVTLGQPASISCRSSQSLVYRDGNTYLNWFHQRPGQSPRRLIYKVSNRDSGVPDRFSGSGSGTDFTLKISRVEAEDVGVYFCMQGTHWPRTFGQGTKLEIK

SEQ ID NO: 2758 - protein, 9 aa, Artificial Sequence
  Description of Artificial Sequence: Synthetic peptide
MQGTHWPRT

SEQ ID NO: 2759 - DNA, 355 bp, Artificial Sequence
  Description of Artificial Sequence: Synthetic polynucleotide
gaggtgcagctggtggagtctgggggaggcctggtcaagcctggggggtccctgagactgtcctgtgcagcctctggattcaccttcaggaactataacatgatctgggtccgccaggctccagggaaggggctggagtgggtctcgtccattagtgatactagtagttacatatactacggagactcagtgaagggccgattcaccatctccagagacaacaccaagaactcactgtatctgcaaatgaacagcctgagagccgaggacacggctatgtattactgtgcttcttacggttcctacgcctactttgactactggggccggggaaccctggtcaccgtctcctcag

SEQ ID NO: 2760 - protein, 118 aa, Artificial Sequence
  Description of Artificial Sequence: Synthetic polypeptide
EVQLVESGGGLVKPGGSLRLSCAASGFTFRNYNMIWVRQAPGKGLEWVSSISDTSSYIYYGDSVKGRFTISRDNTKNSLYLQMNSLRAEDTAMYYCASYGSYAYFDYWGRGTLVTVSS

SEQ ID NO: 2761 - protein, 11 aa, Artificial Sequence
  Description of Artificial Sequence: Synthetic peptide
ASYGSYAYFDY

SEQ ID NO: 2762 - DNA, 325 bp, Artificial Sequence
  Description of Artificial Sequence: Synthetic polynucleotide
gacatccagatgacccagtctccttccaccctgtctgcatctgtaggagacagagtcaccatcacctgccgggccagtcagagtattagtaggtggttggcctggtatcagcagaaaccagggaaagcccctaaggtcctgatctataaggcgtctagtttggaaagtggggtcccatcaaggttcagcggcagtggatctggaacagaattcactctcaccatcagcagcctgcagcctgatgattttgcaacttattactgccaacagtataatacttattctaacatcactttcggcggagggaccaaggtggagatcaaac

SEQ ID NO: 2763 - protein, 108 aa, Artificial Sequence
  Description of Artificial Sequence: Synthetic polypeptide
DIQMTQSPSTLSASVGDRVTITCRASQSISRWLAWYQQKPGKAPKVLIYKASSLESGVPSRFSGSGSGTEFTLTISSLQPDDFATYYCQQYNTYSNITFGGGTKVEIK

SEQ ID NO: 2764 - protein, 10 aa, Artificial Sequence
  Description of Artificial Sequence: Synthetic peptide
QQYNTYSNIT

SEQ ID NO: 2765 - DNA, 358 bp, Artificial Sequence
  Description of Artificial Sequence: Synthetic polynucleotide
caggtgcagctggtgcagtctggggctgaggtgaggaggccagggtcctcggtgaaggtctcctgcaaggcttctgggggcaacttcaacaactacggtttccactgggtgcgacaggcccctggacaaggacttgagtggatgggagggatcatccctgtctttggtacaccaaactacgcacagaaattccagggcagagtcacgattaccgcggacaaatccgcgagtgtggtctacttgaacctgaacagcctgaaattcgacgacacggccgtatattactgtgcgagagaggcaggggccctagcctccttagactattggggccagggaaccctggtcaccgtctcctcag

SEQ ID NO: 2766 - protein, 119 aa, Artificial Sequence
  Description of Artificial Sequence: Synthetic polypeptide
QVQLVQSGAEVRRPGSSVKVSCKASGGNFNNYGFHWVRQAPGQGLEWMGGIIPVFGTPNYAQKFQGRVTITADKSASVVYLNLNSLKFDDTAVYYCAREAGALASLDYWGQGTLVTVSS

SEQ ID NO: 2767 - protein, 12 aa, Artificial Sequence
  Description of Artificial Sequence: Synthetic peptide
AREAGALASLDY

SEQ ID NO: 2768 - DNA, 337 bp, Artificial Sequence
  Description of Artificial Sequence: Synthetic polynucleotide
  modified_base (22)..(22): a, c, t, g, unknown or other
  modified_base (25)..(25): a, c, t, g, unknown or other
gatattgtgatgactcagtctncantctccctgcccgtcacccctggagagccggcctccatctcctgcaggtctagtcagagcctccttcatagaaatggagacaactatttggaatggtatctgcagaagccagggcagcctccacaggtcctgatctacttgggttctaatcgggcctccggggtccctgacaggttcagtggcagtggagcaggcacagattttacactgaaaatcagcagagtggaggctgaggatgttggggtttattactgcatgcaatctctacaaactcctcgtacgttcggccaagggaccaaggtggaaatcaaac

SEQ ID NO: 2769 - protein, 112 aa, Artificial Sequence
  Description of Artificial Sequence: Synthetic polypeptide
  MOD_RES (8)..(9): Any amino acid
DIVMTQSXXSLPVTPGEPASISCRSSQSLLHRNGDNYLEWYLQKPGQPPQVLIYLGSNRASGVPDRFSGSGAGTDFTLKISRVEAEDVGVYYCMQSLQTPRTFGQGTKVEIK

SEQ ID NO: 2770 - protein, 9 aa, Artificial Sequence
  Description of Artificial Sequence: Synthetic peptide
MQSLQTPRT

SEQ ID NO: 2771 - DNA, 366 bp, Artificial Sequence
  Description of Artificial Sequence: Synthetic polynucleotide
caggtacagctgcagcagtcaggtccaggactggtgaagccctcgcagaccctctcactcacctgtgtcatctccggggacagtgtctctagcgacagtgctacttggaactggatcaggcggtccccatcgagaggccttgagtggctgggaaggacatactacaggtccgaatggtattttgattatgcagtatctgtgaaaagtcggataactatcaactcagacacattcaagaatgagttctccctgcaactgaactctgtgactcccgaggacacggctgtgtattactgtgcgaaagccccccagtggccaaactgtatggacgtctggggcctagggaccacggtcaccgtctcctca

SEQ ID NO: 2772 - protein, 122 aa, Artificial Sequence
  Description of Artificial Sequence: Synthetic polypeptide
QVQLQQSGPGLVKPSQTLSLTCVISGDSVSSDSATWNWIRRSPSRGLEWLGRTYYRSEWYFDYAVSVKSRITINSDTFKNEFSLQLNSVTPEDTAVYYCAKAPQWPNCMDVWGLGTTVTVSS

SEQ ID NO: 2773 - protein, 12 aa, Artificial Sequence
  Description of Artificial Sequence: Synthetic peptide
AKAPQWPNCMDV

SEQ ID NO: 2774 - DNA, 319 bp, Artificial Sequence
  Description of Artificial Sequence: Synthetic polynucleotide
gaaatagtgatgacgcagtctccagccaccctgtctgtgtctccaggggaaagagcctccctctcctgcagggccagtcagagtgttagcagcaacttagcctggtaccagcagaagcctggccaggctcccaggctcctcatctatggtgcatctaccagggccactggtgtcccagccaggttcagtggcagtgggtctgggacagagttcactctcaccatcagcagcctgcagtctgaagattttgcagtttattactgtcagcagtatgatgactggccccttactttcggcggagggaccaaggtggagatca

SEQ ID NO: 2775 - protein, 106 aa, Artificial Sequence
  Description of Artificial Sequence: Synthetic polypeptide
EIVMTQSPATLSVSPGERASLSCRASQSVSSNLAWYQQKPGQAPRLLIYGASTRATGVPARFSGSGSGTEFTLTISSLQSEDFAVYYCQQYDDWPLTFGGGTKVEI

SEQ ID NO: 2776 - protein, 9 aa, Artificial Sequence
  Description of Artificial Sequence: Synthetic peptide
QQYDDWPLT

SEQ ID NO: 2777 - DNA, 358 bp, Artificial Sequence
  Description of Artificial Sequence: Synthetic polynucleotide
caggtgcagctggtgcagtctggggctgaggtgaagaagcctgggtcctcggtgaaggtctcctgcaagtcttctggaggcaacttcaacaactttgccatctggtgggtgcgacaggcccctggacaaggacttgagtggatgggagggatcatccctgcttttggttcagcaaactacgcacagaaattccggggcagagtcacgattaccgcggacgtatccacgaggacggcctacatggaactgagtagcctgagatctgaggacacggccctatattattgtgcgagagatggcggggttactctaggatttgaatattggggccagggaaccctggtcaccgtctcctcag

SEQ ID NO: 2778 - protein, 119 aa, Artificial Sequence
  Description of Artificial Sequence: Synthetic polypeptide
QVQLVQSGAEVKKPGSSVKVSCKSSGGNFNNFAIWWVRQAPGQGLEWMGGIIPAFGSANYAQKFRGRVTITADVSTRTAYMELSSLRSEDTALYYCARDGGVTLGFEYWGQGTLVTVSS

SEQ ID NO: 2779 - protein, 12 aa, Artificial Sequence
  Description of Artificial Sequence: Synthetic peptide
ARDGGVTLGFEY

SEQ ID NO: 2780 - DNA, 322 bp, Artificial Sequence
  Description of Artificial Sequence: Synthetic polynucleotide
gaaattgtgttgacgcagtctccaggcaccctgtatttgtctccaggggaaagagccaccgtctcctgcagggccagtcagagtgtcagcagcgactacttagcctggtaccagcagagacctggccaggctcccagactcctcatctatggtgcatccagcagggccactggcatcccagacaggttcagtggcagtgggtctgggacagacttcactctcaccatcagcagactggagcctgaagattttgcagtttattactgtcagcagtatggtggcccgtacacttttggccaggggaccaggctgcagatcaaac

SEQ ID NO: 2781 - protein, 107 aa, Artificial Sequence
  Description of Artificial Sequence: Synthetic polypeptide
EIVLTQSPGTLYLSPGERATVSCRASQSVSSDYLAWYQQRPGQAPRLLIYGASSRATGIPDRFSGSGSGTDFTLTISRLEPEDFAVYYCQQYGGPYTFGQGTRLQIK

SEQ ID NO: 2782 - protein, 8 aa, Artificial Sequence
  Description of Artificial Sequence: Synthetic peptide
QQYGGPYT

SEQ ID NO: 2783 - DNA, 355 bp, Artificial Sequence
  Description of Artificial Sequence: Synthetic polynucleotide
caggtgcagctggtgcagtctggggctgcggtgaagaagcctgggtcctcggtgaaggtctcctgcaaggcttctgggggcaccttcagcaactttgctatcaactgggtgcggcaggcacagggacaagggcttgagtggatgggaaacatcatccctttctttggtacagcaaactacgcacagacgttgcagggcagagtcacgattaccgcggacgtatccgcgagtacagcctacatggagttgaacagcctgagatctgaggacacggccatatattactgtgcgagagatgggggccacggtgacctagactactggggccagggatccctggtcaccgtctcctcag

SEQ ID NO: 2784 - protein, 118 aa, Artificial Sequence
  Description of Artificial Sequence: Synthetic polypeptide
QVQLVQSGAAVKKPGSSVKVSCKASGGTFSNFAINWVRQAQGQGLEWMGNIIPFFGTANYAQTLQGRVTITADVSASTAYMELNSLRSEDTAIYYCARDGGHGDLDYWGQGSLVTVSS

SEQ ID NO: 2785 - protein, 11 aa, Artificial Sequence
  Description of Artificial Sequence: Synthetic peptide
ARDGGHGDLDY

SEQ ID NO: 2786 - DNA, 337 bp, Artificial Sequence
  Description of Artificial Sequence: Synthetic polynucleotide
gatattgtgatgactcagtctccactctccctgcccgtcacccctggagagccggcctccatctcctgcaggtctagtcagagcctcctgcatagaactggatacaactatttgagttggtatgtgcagaagccagggcagtctccacaggtcctgatctatttgggttctagtcgggcctccggggtccctgacaggttcagtggcagtggatcaggcacagattttacactgaaaatcagcagagtggaggctgaggatgttggggtttattactgcatgcaagctctacaaactccgtggacgttcggccaagggaccaaggtggaaatcaaac

SEQ ID NO: 2787 - protein, 112 aa, Artificial Sequence
  Description of Artificial Sequence: Synthetic polypeptide
DIVMTQSPLSLPVTPGEPASISCRSSQSLLHRTGYNYLSWYVQKPGQSPQVLIYLGSSRASGVPDRFSGSGSGTDFTLKISRVEAEDVGVYYCMQALQTPWTFGQGTKVEIK

SEQ ID NO: 2788 - protein, 9 aa, Artificial Sequence
  Description of Artificial Sequence: Synthetic peptide
MQALQTPWT

SEQ ID NO: 2789 - DNA, 358 bp, Artificial Sequence
  Description of Artificial Sequence: Synthetic polynucleotide
gaggtgcagctggtggagtctgggggaggcctggtcaagcctggggggtccctgagactctcctgtgcggcctctggattcaccttcagtacctctaccatgcactgggtccgtcaggccccagggaaggggctggagtggctctcaattattagtgacactagcagtgacatttaccacgcagagtcactgaacggccgattcaccatctccagagacaacgccaagaactcactgtatctgcaaatgaacagcctgacagtcgaggacacggctgtgtattactgtgcgaaagatgggggtgactacgcatacttccaacactggggccagggcaccctggtcaccgtctcgtcag

SEQ ID NO: 2790 - protein, 119 aa, Artificial Sequence
  Description of Artificial Sequence: Synthetic polypeptide
EVQLVESGGGLVKPGGSLRLSCAASGFTFSTSTMHWVRQAPGKGLEWLSIISDTSSDIYHAESLNGRFTISRDNAKNSLYLQMNSLTVEDTAVYYCAKDGGDYAYFQHWGQGTLVTVSS

SEQ ID NO: 2791 - protein, 12 aa, Artificial Sequence
  Description of Artificial Sequence: Synthetic peptide
AKDGGDYAYFQH

SEQ ID NO: 2792 - DNA, 325 bp, Artificial Sequence
  Description of Artificial Sequence: Synthetic polynucleotide
gacatccagatgacccagtctccttccaccctgtctgcttctgtaggagacagagtcgccatcacttgccgggccagtcaaaatattagaacctggttggcctggtatcagcagaaaccagggaaagcccctaaactcctaatctataaggcttctactttagagagtggggtcccatcaaggttcagcgggagtggatctgggacagaattcactctcaccgtcagcagcctgcagccagatgattttgcgacttattactgccaacagtataatacttattcgaagatcactttcggcggagggaccaaggtggagatcaaac

SEQ ID NO: 2793 - protein, 108 aa, Artificial Sequence
  Description of Artificial Sequence: Synthetic polypeptide
DIQMTQSPSTLSASVGDRVAITCRASQNIRTWLAWYQQKPGKAPKLLIYKASTLESGVPSRFSGSGSGTEFTLTVSSLQPDDFATYYCQQYNTYSKITFGGGTKVEIK

SEQ ID NO: 2794 - protein, 10 aa, Artificial Sequence
  Description of Artificial Sequence: Synthetic peptide
QQYNTYSKIT

SEQ ID NO: 2795 - DNA, 355 bp, Artificial Sequence
  Description of Artificial Sequence: Synthetic polynucleotide
caggtgcagctggtgcagtctggggctgaggtgaagaggcctgggtcctcggtgaaggtctcctgcaaggcttctggaggcaccttcaacacctatgccttcagctgggtgcgacaggcccctggacaagggcttcaatacatgggagggatcatccctgtctttggaacaccaaactacgcacagaagttccagggcagagtcactattaccgcggacaagtccacgagcacagcctacatggagctaaacagcctgagatctgacgacacggccgtctattactgtgcgagagatgggggtactgggagctttgactactggggccagggaaccctggtcaccgtctcctcag

SEQ ID NO: 2796 - protein, 118 aa, Artificial Sequence
  Description of Artificial Sequence: Synthetic polypeptide
QVQLVQSGAEVKRPGSSVKVSCKASGGTFNTYAFSWVRQAPGQGLQYMGGIIPVFGTPNYAQKFQGRVTITADKSTSTAYMELNSLRSDDTAVYYCARDGGTGSFDYWGQGTLVTVSS

SEQ ID NO: 2797 - protein, 11 aa, Artificial Sequence
  Description of Artificial Sequence: Synthetic peptide
ARDGGTGSFDY

SEQ ID NO: 2798 - DNA, 334 bp, Artificial Sequence
  Description of Artificial Sequence: Synthetic polynucleotide
gatattgtgatgactcagtctccactctccctgtccgtcacccctggagagccggcctccatctcctgcaggtctagtcagagcctcctgcatagggatggacacaactatttggattggtatgtgcagaagccagggcagtctccacaactcctgatctattggggttctaatcgggcctccggggtccctgccaggttcagtggcagtggatcaggcacagattttacactgaaaatcagcagagtggaggctgaggatattggggtttattattgcatgcaagctctacagagtcagacgtttggccaggggaccaagctggagatcaaac

SEQ ID NO: 2799 - protein, 111 aa, Artificial Sequence
  Description of Artificial Sequence: Synthetic polypeptide
DIVMTQSPLSLSVTPGEPASISCRSSQSLLHRDGHNYLDWYVQKPGQSPQLLIYWGSNRASGVPARFSGSGSGTDFTLKISRVEAEDIGVYYCMQALQSQTFGQGTKLEIK

SEQ ID NO: 2800 - protein, 8 aa, Artificial Sequence
  Description of Artificial Sequence: Synthetic peptide
MQALQSQT

SEQ ID NO: 2801 - DNA, 355 bp, Artificial Sequence
  Description of Artificial Sequence: Synthetic polynucleotide
caggtgcagctggtgcagtctggggctgaggtgaagaagcctgggtcctcggtgaaggtctcttgcaagtcttttggaggcaccttcgacaactatgctatcacctgggtgcgacaggcccctggacaagggcttgagtggatgggaaggatcatccctttctttcgtacgccaaactacgcacagagattgcagggcagattgacgattaccgcggacgaatctacgagcacagtctttatggagttgagcaggctgagatctgaggacacggccatgtattactgtacgagagatggcggtttagggagttttgactactggggccagggaaccctggtcaccgtctcctcag

SEQ ID NO: 2802 - protein, 118 aa, Artificial Sequence; identical to SEQ ID NO: 83
  Description of Artificial Sequence: Synthetic polypeptide

SEQ ID NO: 2803 - protein, 11 aa, Artificial Sequence
  Description of Artificial Sequence: Synthetic peptide
TRDGGLGSFDY

SEQ ID NO: 2804 - DNA, 337 bp, Artificial Sequence
  Description of Artificial Sequence: Synthetic polynucleotide
gatattgtgatgactcagtctccactctccctgcccgtcacccctggagagccggcctccatctcctgcaggtctagccagagcctcgtgcatcggactggatacaactatttggattggtatctgcagaagccagggcagcctccacatctcctgatctatatgggttctaatcgggcctccggagtccctgacaggttcagtggcagtggatcaggcacagaattcacattgaagatcagcagagtggaggccgaggacgttggcatttattactgcatgcaagctctacaaactcctccgacgttcggccaagggaccaaggtggagatcaaac

SEQ ID NO: 2805 - protein, 112 aa, Artificial Sequence
  Description of Artificial Sequence: Synthetic polypeptide
DIVMTQSPLSLPVTPGEPASISCRSSQSLVHRTGYNYLDWYLQKPGQPPHLLIYMGSNRASGVPDRFSGSGSGTEFTLKISRVEAEDVGIYYCMQALQTPPTFGQGTKVEIK

SEQ ID NO: 2806 - protein, 9 aa, Artificial Sequence
  Description of Artificial Sequence: Synthetic peptide
MQALQTPPT

SEQ ID NO: 2807 - DNA, 358 bp, Artificial Sequence
  Description of Artificial Sequence: Synthetic polynucleotide
caggtgcagctggtgcagtctggggctgaggtgaagaagcctgggtcctcggtgaaggtctcctgcaaggcttctggaggcaccttcaggaactatgatatcagctgggtgcgacaggcccctggacaagggcttgagtggatgggagggatcatccctgtgtttggtacaccaaagtacgcacagaagttccagggcagagtcacgattaccgcggacgaatccacgagcacagcctacatggagctgaccagcctgagatctgaagacacggccgtgtattactgtgcgagagaaggcggctacaatccttcctttgactactggggccagggaaccctggtcacagtctcctcag

SEQ ID NO: 2808 - protein, 119 aa, Artificial Sequence
  Description of Artificial Sequence: Synthetic polypeptide
QVQLVQSGAEVKKPGSSVKVSCKASGGTFRNYDISWVRQAPGQGLEWMGGIIPVFGTPKYAQKFQGRVTITADESTSTAYMELTSLRSEDTAVYYCAREGGYNPSFDYWGQGTLVTVSS

SEQ ID NO: 2809 - protein, 12 aa, Artificial Sequence
  Description of Artificial Sequence: Synthetic peptide
AREGGYNPSFDY

SEQ ID NO: 2810 - DNA, 322 bp, Artificial Sequence
  Description of Artificial Sequence: Synthetic polynucleotide
gaaattgtgttgacacagtctccagccaccctgtctttgtcgccaggggaaagagccaccctctcctgcagggccagtcagagtgttagcagctacttagcctggtatcaacacaaacctggccaggctcccaggctcctcatctatgatgcatccaacagggccactggcatcccagccaggttcagtggcagtgggtctgggacagacttcactctcaccatcagcagcctagagcctgaagattttgcagtgtattactgtcagcagcgtagcaactggctggtcaccttcggccaagggacacgactggagattaaac

SEQ ID NO: 2811 - protein, 107 aa, Artificial Sequence
  Description of Artificial Sequence: Synthetic polypeptide
EIVLTQSPATLSLSPGERATLSCRASQSVSSYLAWYQHKPGQAPRLLIYDASNRATGIPARFSGSGSGTDFTLTISSLEPEDFAVYYCQQRSNWLVTFGQGTRLEIK

SEQ ID NO: 2812 - protein, 9 aa, Artificial Sequence
  Description of Artificial Sequence: Synthetic peptide
QQRSNWLVT

SEQ ID NO: 2813 - DNA, 373 bp, Artificial Sequence
  Description of Artificial Sequence: Synthetic polynucleotide
gaggtgcagctggtggagtctggggggggcttggtgcagcctggagggtccctgagactctcctgtgtagcctctggattcaccttcactacttatgacatgagctgggtccgccaggctccagggaaggggctggagtgggtttcatacattagtcgtcgtggtggtagcgttttgtacgcagactctgtgaagggccgattcaccatctccagagacaacgccaagagctcactgcatctgcaaatgaacagcctcagagtcgaggacacggctgtctattactgtgcgagagacggagatggctccaattttttcgggtatgggcactttgacaactggggccagggaaccctggtcaccgtctcctcag

SEQ ID NO: 2814 - protein, 124 aa, Artificial Sequence
  Description of Artificial Sequence: Synthetic polypeptide
EVQLVESGGGLVQPGGSLRLSCVASGFTFTTYDMSWVRQAPGKGLEWVSYISRRGGSVLYADSVKGRFTISRDNAKSSLHLQMNSLRVEDTAVYYCARDGDGSNFFGYGHFDNWGQGTLVTVSS

SEQ ID NO: 2815 - protein, 17 aa, Artificial Sequence
  Description of Artificial Sequence: Synthetic peptide
ARDGDGSNFFGYGHFDN

SEQ ID NO: 2816 - DNA, 322 bp, Artificial Sequence
  Description of Artificial Sequence: Synthetic polynucleotide
gaaattgtgttgacacagtctccagccaccctgtctttgtctccaggggaaagagccaccctctcctgcagggccagtcagagtgttagcggctacttagcctggtaccagcagagacctggccaggctcccaggctcctcatctatgatgcatccatcagggccactggcatcccagccagattcagtggcagtgggtctgggacagacttcactctcaccatcagcagcctagagcctgaagattttgcagtttattactgtcagcagcgtagcaactggccgcccactttcggcggagggaccaaggtggagatcaaac

SEQ ID NO: 2817 - protein, 107 aa, Artificial Sequence
  Description of Artificial Sequence: Synthetic polypeptide
EIVLTQSPATLSLSPGERATLSCRASQSVSGYLAWYQQRPGQAPRLLIYDASIRATGIPARFSGSGSGTDFTLTISSLEPEDFAVYYCQQRSNWPPTFGGGTKVEIK

SEQ ID NO: 2818 - protein, 9 aa, Artificial Sequence
  Description of Artificial Sequence: Synthetic peptide
QQRSNWPPT

SEQ ID NO: 2819 - DNA, 352 bp, Artificial Sequence
  Description of Artificial Sequence: Synthetic polynucleotide
caggtgcagctggtgcagtctggggctgaggtgaagaagcctgggtcctcggtgaaggtctcctgcaaggcttctggaggcaccttcagcaactatcctattagctgggtgcgacaggcccctggacaagggcttgagtggatgggagcgatcatccctttctttggtacaccaaactacgcacggaggttccaggccagagtcacaataaccgcggacgaatctacgaccacagcctacatggagctgagcagcctgacatctgaagacacggccgtctatttctgtgcgactggtggttattacccctttgactactggggccagggaaccctggtcaccgtctcctcag

SEQ ID NO: 2820 - protein, 117 aa, Artificial Sequence
  Description of Artificial Sequence: Synthetic polypeptide
QVQLVQSGAEVKKPGSSVKVSCKASGGTFSNYPISWVRQAPGQGLEWMGAIIPFFGTPNYARRFQARVTITADESTTTAYMELSSLTSEDTAVYFCATGGYYPFDYWGQGTLVTVSS

SEQ ID NO: 2821 - protein, 10 aa, Artificial Sequence
  Description of Artificial Sequence: Synthetic peptide
ATGGYYPFDY

SEQ ID NO: 2822 - DNA, 322 bp, Artificial Sequence
  Description of Artificial Sequence: Synthetic polynucleotide
gacatccagatgacccagtctccatcctcactgtctgcatctgtaggagacagagtcaccatcacttgtcgggcgagtcaggacattagcacttatttagcctggtttcagcagaaaccaggaaaagcccctaagtccctgatctatgatgcctctagtttgcaaagtggggtcccatcaaggttcagcggcagtggatctgggacagatttcactctcaccatcagcagcctgcagcctgaagattttgcaacttattactgccaacactataaacggtacccttggacgttcggccaggggaccaaggtggaaatcaaac

SEQ ID NO: 2823 - protein, 107 aa, Artificial Sequence
  Description of Artificial Sequence: Synthetic polypeptide
DIQMTQSPSSLSASVGDRVTITCRASQDISTYLAWFQQKPGKAPKSLIYDASSLQSGVPSRFSGSGSGTDFTLTISSLQPEDFATYYCQHYKRYPWTFGQGTKVEIK

SEQ ID NO: 2824 - protein, 9 aa, Artificial Sequence
  Description of Artificial Sequence: Synthetic peptide
QHYKRYPWT

SEQ ID NO: 2825 - DNA, 355 bp, Artificial Sequence
  Description of Artificial Sequence: Synthetic polynucleotide
caggtccagctggtgcagtctggggctgagctgaagaagcctgggtcctcggtgagggtctcctgcaaggcctctggaggcaccctcaacaactatcctgtcagctgggtgcgacaggcccctggtcgagggcttgagtggatgggaggtatcatccctgtctttggtacaccaaactacgcacagaacttccagggcagagtcacgattaccgcggacacatccacgagcacgacctacatagaggtgaccagcctgacatctgaggacacggccgtttattactgtgcgagaggtggcgcttacggtgactataactattggggccagggcaccctggtcaccgtctcctcag

SEQ ID NO: 2826 - protein, 118 aa, Artificial Sequence
  Description of Artificial Sequence: Synthetic polypeptide
QVQLVQSGAELKKPGSSVRVSCKASGGTLNNYPVSWVRQAPGRGLEWMGGIIPVFGTPNYAQNFQGRVTITADTSTSTTYIEVTSLTSEDTAVYYCARGGAYGDYNYWGQGTLVTVSS

SEQ ID NO: 2827 - protein, 11 aa, Artificial Sequence
  Description of Artificial Sequence: Synthetic peptide
ARGGAYGDYNY

SEQ ID NO: 2828 - DNA, 325 bp, Artificial Sequence
  Description of Artificial Sequence: Synthetic polynucleotide
gacatccagatgacccagtctccatcctccctgtctgcatctctaggagacagagtcaccatcagctgccaggcgagtcaggacatcaggacctatttaaattggtatcagcaaaaaccagggagagcccctaagctcctgatctacgatgcatccaatctggaaacaggggtcccgccaaggttcagtggaagtggatctgggacagattttactttcaccatcagtagcctgcagcctgaagatattgcaacatattactgtcaacactatgataatctcccgacgctcactttcggcggagggaccaaggtggagatcaaac

SEQ ID NO: 2829 - protein, 108 aa, Artificial Sequence
  Description of Artificial Sequence: Synthetic polypeptide
DIQMTQSPSSLSASLGDRVTISCQASQDIRTYLNWYQQKPGRAPKLLIYDASNLETGVPPRFSGSGSGTDFTFTISSLQPEDIATYYCQHYDNLPTLTFGGGTKVEIK

SEQ ID NO: 2830 - protein, 10 aa, Artificial Sequence
  Description of Artificial Sequence: Synthetic peptide
QHYDNLPTLT

SEQ ID NO: 2831 - DNA, 355 bp, Artificial Sequence
  Description of Artificial Sequence: Synthetic polynucleotide
caggtgcagctggtgcagtctggggctgaggtgaagaagcctgggtcctcggtgaaggtctcctgcaaggcttctggaggcactttcagcaattttgctatcagttgggtgcgacaggcccctggacaaggccttgagtggatgggggggatcattccagtctttggtacagcaaactacgcacagaagttccagggcagagtcacgattaccgcggacgagtccacgaacacagcctacatggagttgagcagcctgagatctgaagacacggccgtattttactgtgcgagagatgggggtgttaacccgctcgagtattggggccagggaagccaggtcaccgtctcctcag

SEQ ID NO: 2832 - protein, 118 aa, Artificial Sequence
  Description of Artificial Sequence: Synthetic polypeptide
QVQLVQSGAEVKKPGSSVKVSCKASGGTFSNFAISWVRQAPGQGLEWMGGIIPVFGTANYAQKFQGRVTITADESTNTAYMELSSLRSEDTAVFYCARDGGVNPLEYWGQGSQVTVSS

SEQ ID NO: 2833 - protein, 11 aa, Artificial Sequence
  Description of Artificial Sequence: Synthetic peptide
ARDGGVNPLEY

SEQ ID NO: 2834 - DNA, 337 bp, Artificial Sequence
  Description of Artificial Sequence: Synthetic polynucleotide
gatattgtgatgactcagtctccactctccctgcccgtcacccctggagagccggcctccatctcctgcaggtctagtcagagcctcctgcatagtcatggatacaactatttgaattggtacctgcaaaagccagggcagtccccacaactcctgatctatttgggttctaatcgggcctccggggtccctgacaggttcagtggcagtggatcaggcagagattttacactgaaaatcagtagagtggaggctgaggatgttggagtttattactgcatgcaagctctacaaactccgcacacttttggccaggggaccaagctggagatcaaac

SEQ ID NO: 2835 - protein, 112 aa, Artificial Sequence
  Description of Artificial Sequence: Synthetic polypeptide
DIVMTQSPLSLPVTPGEPASISCRSSQSLLHSHGYNYLNWYLQKPGQSPQLLIYLGSNRASGVPDRFSGSGSGRDFTLKISRVEAEDVGVYYCMQALQTPHTFGQGTKLEIK

SEQ ID NO: 2836 - protein, 9 aa, Artificial Sequence
  Description of Artificial Sequence: Synthetic peptide
MQALQTPHT

SEQ ID NO: 2837 - DNA, 353 bp, Artificial Sequence
  Description of Artificial Sequence: Synthetic polynucleotide
caggtgcagctggtgcagtctggggctgaggtgaagaagcctgggtcctcggtgcaggtctcctgcaaggcttctggaggcaccttcggcaactatgatattagctgggtgcgacaggcccctggacaggggcttgagtggatgggagggatcatccctgtctttgggacaccaaactacgcacagaagttccagggcagagtcacaattaccgcggacgaatccacgagcacagcctacttggaactgagaaccctgagatctgaggacacggccatatattattgtgcgagagattcgggaacagcatcttttgactactggggccagggaaccctcgtcaccgtctcctc

SEQ ID NO: 2838 - protein, 117 aa, Artificial Sequence
  Description of Artificial Sequence: Synthetic polypeptide
QVQLVQSGAEVKKPGSSVQVSCKASGGTFGNYDISWVRQAPGQGLEWMGGIIPVFGTPNYAQKFQGRVTITADESTSTAYLELRTLRSEDTAIYYCARDSGTASFDYWGQGTLVTVS

SEQ ID NO: 2839 - protein, 11 aa, Artificial Sequence
  Description of Artificial Sequence: Synthetic peptide
ARDSGTASFDY

SEQ ID NO: 2840 - DNA, 322 bp, Artificial Sequence
  Description of Artificial Sequence: Synthetic polynucleotide
gacatccagatgacccagtctccatcctccctgtctgcatctgtgggagacagagtcaccatcacttgccgggcaagtcagggcattagcagctatttaaattggtatcagcacaaaccagggaaagtcccaaagctcctgatctatggtgcgtccaatttgcaaagtggggtcccatcaaggttcagtggcagtggatctgggacagatttcactctcaccatcaacaacctgcaacctgaagatcttgcaacttactactgtcagcagagttacagaatccctctcagtttcggccaggggaccaagctggagatcaaac

SEQ ID NO: 2841 - protein, 107 aa, Artificial Sequence
  Description of Artificial Sequence: Synthetic polypeptide
DIQMTQSPSSLSASVGDRVTITCRASQGISSYLNWYQHKPGKVPKLLIYGASNLQSGVPSRFSGSGSGTDFTLTINNLQPEDLATYYCQQSYRIPLSFGQGTKLEIK

SEQ ID NO: 2842 - protein, 9 aa, Artificial Sequence
  Description of Artificial Sequence: Synthetic peptide
QQSYRIPLS

SEQ ID NO: 2843 - DNA, 370 bp, Artificial Sequence
  Description of Artificial Sequence: Synthetic polynucleotide
gaggtgcagctggtggagtctgggggaggcttggtacagccgggggggtctctgagactctcctgtgcagcctctggattcacctttagtagctatgccatgagctgggtccgccaggctccagggaaggggctggagtggatcgcagctattactcatagtggtgatggtacatactacgcagactccgtgaagggccggttcaccatctccagagacaattccaagaacacgctttatctgcgaatgaacagcctgagagccgaggacacggccctatattactgtgcgaaagatggtcccgatagacgtggctggttgaactactttgactactggggccagggaaccctggccaccgtctcctcag

SEQ ID NO: 2844 - protein, 123 aa, Artificial Sequence
  Description of Artificial Sequence: Synthetic polypeptide
EVQLVESGGGLVQPGGSLRLSCAASGFTFSSYAMSWVRQAPGKGLEWIAAITHSGDGTYYADSVKGRFTISRDNSKNTLYLRMNSLRAEDTALYYCAKDGPDRRGWLNYFDYWGQGTLATVSS

SEQ ID NO: 2845 - protein, 16 aa, Artificial Sequence
  Description of Artificial Sequence: Synthetic peptide
AKDGPDRRGWLNYFDY

SEQ ID NO: 2846 - DNA, 322 bp, Artificial Sequence
  Description of Artificial Sequence: Synthetic polynucleotide
gaaattgtgttgacacagtctccagccaccctgtctttgtctccaggggaaagagccaccctctcctgcagggccagtcagagtgttatcagctacttagcctggtaccaacagaaacctggccaggctcccaggctcctcatctatgatgcatccaccagggccactggcatcccagccaggttcagtggcagtgggtctgggacagacttcactctcaccatcagtcgcctagagcctgaagattttgcagtttattactgtcagcagcgtaacaactggcctcccaccttcggccaagggacacgactggagcttaaac

SEQ ID NO: 2847 - protein, 107 aa, Artificial Sequence
  Description of Artificial Sequence: Synthetic polypeptide
EIVLTQSPATLSLSPGERATLSCRASQSVISYLAWYQQKPGQAPRLLIYDASTRATGIPARFSGSGSGTDFTLTISRLEPEDFAVYYCQQRNNWPPTFGQGTRLELK

SEQ ID NO: 2848 - protein, 9 aa, Artificial Sequence
  Description of Artificial Sequence: Synthetic peptide
QQRNNWPPT

SEQ ID NO: 2849 - DNA, 355 bp, Artificial Sequence
  Description of Artificial Sequence: Synthetic polynucleotide
caggtgcagctggtgcagtctggggctgaggtgaagaagcctgggtcctcggtgaaggtctcctgcaagtcttctggaggcaggttcaacaactatgctatcgtctgggtgcgacaggcccctggacaagggcttgagtggatgggggggatcatccctgtctttggaacaccaaactacgcacagaaattccggggcagagtcaaaatcaccgcggacgaatccacgaccacgaccacagcctacatggagctgagcagcctgagatctgaggacacggccgtttattactgtgcgagggataattgggggctcgacccctggggccagggaaccctggtcaccgtctcctcag

SEQ ID NO: 2850 - protein, 118 aa, Artificial Sequence
  Description of Artificial Sequence: Synthetic polypeptide
QVQLVQSGAEVKKPGSSVKVSCKSSGGRFNNYAIVWVRQAPGQGLEWMGGIIPVFGTPNYAQKFRGRVKITADESTTTTTAYMELSSLRSEDTAVYYCARDNWGLDPWGQGTLVTVSS

SEQ ID NO: 2851 - protein, 9 aa, Artificial Sequence
  Description of Artificial Sequence: Synthetic peptide
ARDNWGLDP

SEQ ID NO: 2852 - DNA, 325 bp, Artificial Sequence
  Description of Artificial Sequence: Synthetic polynucleotide
gaaattgtgttgacgcagtctccaggcaccctgtctttgtctccaggggaaagagccaccctctcctgcagggccagtcagagtgttaatagcgactacttagcctggtaccagcagaaacctggccaggctcccaggctcctcatctatggtgcatccaccagggccactggcatcccagacaggttcagtggcagtgggtcggggacagacttcactctcaccatcagcagactggagcctgaagattttgcagtgtattactgtcagcagtctggtgtctcacctatcaccttcggccaagggacacgactgcagattaaac

SEQ ID NO: 2853 - protein, 108 aa, Artificial Sequence
  Description of Artificial Sequence: Synthetic polypeptide
EIVLTQSPGTLSLSPGERATLSCRASQSVNSDYLAWYQQKPGQAPRLLIYGASTRATGIPDRFSGSGSGTDFTLTISRLEPEDFAVYYCQQSGVSPITFGQGTRLQIK

SEQ ID NO: 2854 - protein, 9 aa, Artificial Sequence
  Description of Artificial Sequence: Synthetic peptide
QQSGVSPIT

SEQ ID NO: 2855 - DNA, 355 bp, Artificial Sequence
  Description of Artificial Sequence: Synthetic polynucleotide
caggtgcagctggtgcagtctggggcggaggtgaagaagcctgggtcctcggtgaaggtctcctgcaaggtttccggaggcactttcaacacctttgctatcaactgggtgcgccaggcccctggacaagggcttgagtggatgggacagatcatccctgtctttggtaccgcaaactacgcacagaaattccaggtcagagtcaaaattaccgcggacgaatcttcgagcacggcctacatggagctgaacagcctgagatctgaagacacggccgtgttttactgtgcgaggtcgggtggttcagggagttttgactactggggccagggaaccctggtcaccgtctcctcag

SEQ ID NO: 2856 - protein, 118 aa, Artificial Sequence
  Description of Artificial Sequence: Synthetic polypeptide
QVQLVQSGAEVKKPGSSVKVSCKVSGGTFNTFAINWVRQAPGQGLEWMGQIIPVFGTANYAQKFQVRVKITADESSSTAYMELNSLRSEDTAVFYCARSGGSGSFDYWGQGTLVTVSS

SEQ ID NO: 2857 - protein, 11 aa, Artificial Sequence
  Description of Artificial Sequence: Synthetic peptide
ARSGGSGSFDY

SEQ ID NO: 2858 - DNA, 337 bp, Artificial Sequence
  Description of Artificial Sequence: Synthetic polynucleotide
gatattgtgatgactcagtctccactctccctgcccgtcacccctggagagccggcctccatctcctgcaggtctagtcagagtctcctgcatcgtgatgggaacaactatttggattggtacctgcagaagccagggcagtctccacagctcctgctctatttggcttctaatcgggcctccggggtccctgacaggttcagcggcagtggatcaggcacatcttttacactgaaaatcagcagagtggaggctgaggatgttggggtttattactgcatggaaactctacgaactccgcacacttttggccaggggaccaagctggagatcaaac

SEQ ID NO: 2859 - protein, 112 aa, Artificial Sequence
  Description of Artificial Sequence: Synthetic polypeptide
DIVMTQSPLSLPVTPGEPASISCRSSQSLLHRDGNNYLDWYLQKPGQSPQLLLYLASNRASGVPDRFSGSGSGTSFTLKISRVEAEDVGVYYCMETLRTPHTFGQGTKLEIK

SEQ ID NO: 2860 - protein, 9 aa, Artificial Sequence
  Description of Artificial Sequence: Synthetic peptide
METLRTPHT

SEQ ID NO: 2861 - DNA, 355 bp, Artificial Sequence
  Description of Artificial Sequence: Synthetic polynucleotide
caggtgcagctggtgcagtctggggctgaggtgaagaagcctgggtcgtcggtgaaggtctcctgtaaggcttctggaggcaccttcagcaactatgctatcaattgggtgcgaaaagtccctggacaagggcttgagtggatgggagggatcatccctttctttggtacaccaaactacgcacagaagttccaggacagagtcacgataaccgcagacgactccacgagcacagcctacatggaggtgcgcagcctgagatctgacgacacggccgtctattattgtgcgagagatgggggtgttaatccactggaatactggggccagggaaccctggtctccgtctcctcag

SEQ ID NO: 2862 - protein, 118 aa, Artificial Sequence
  Description of Artificial Sequence: Synthetic polypeptide
QVQLVQSGAEVKKPGSSVKVSCKASGGTFSNYAINWVRKVPGQGLEWMGGIIPFFGTPNYAQKFQDRVTITADDSTSTAYMEVRSLRSDDTAVYYCARDGGVNPLEYWGQGTLVSVSS

SEQ ID NO: 2863 - protein, 11 aa, Artificial Sequence
  Description of Artificial Sequence: Synthetic peptide
ARDGGVNPLEY

SEQ ID NO: 2864 - DNA, 337 bp, Artificial Sequence
  Description of Artificial Sequence: Synthetic polynucleotide
  modified_base (25)..(25): a, c, t, g, unknown or other
gatattgtgatgactcagtctccantctccctgcccgtcacccctggagagtcggcctccatttcctgcaggtctagtcagagtctcctgcatagtaatggatacaactatttgaattggtacctgcagaaggcagggcagtctccacagctcctgatctatttgggttctaatcgggcctccggggtccctgacaggttcagcggcagtggatcaggcacagattttacactgaaaatcagcggagtggaggctgaggatgttggggtttattactgcatgcaagctctacaaactccgcacacttttggccaggggaccaagctggagatcaaac

SEQ ID NO: 2865 - protein, 112 aa, Artificial Sequence
  Description of Artificial Sequence: Synthetic polypeptide
  MOD_RES (9)..(9): Any amino acid
DIVMTQSPXSLPVTPGESASISCRSSQSLLHSNGYNYLNWYLQKAGQSPQLLIYLGSNRASGVPDRFSGSGSGTDFTLKISGVEAEDVGVYYCMQALQTPHTFGQGTKLEIK

SEQ ID NO: 2866 - protein, 9 aa, Artificial Sequence
  Description of Artificial Sequence: Synthetic peptide
MQALQTPHT

SEQ ID NO: 2867 - DNA, 358 bp, Artificial Sequence
  Description of Artificial Sequence: Synthetic polynucleotide
caggtgcagctggtgcagtctggggctgaggtgaagaagcctgggtcctcggtgaaggtctcctgcaaggcttctggaggcaccttcagcaattatgtcatcagctgggtgcgacaggcccctggacaagggcttgagtggatgggagggatcatccctatctttggtacagcaaagtacgcacagaagttccagggcagagtcacgattaccgcggacgaatccacgagcacagcctacatggagttgagcagcctgagatctgaggacacggccgtgtatttctgtgcccgggcggggggagcagtggctggtcttgactactggggccagggaaccctggtcaccgtctcctcag

SEQ ID NO: 2868 - protein, 119 aa, Artificial Sequence; identical to SEQ ID NO: 87
  Description of Artificial Sequence: Synthetic polypeptide

SEQ ID NO: 2869 - protein, 12 aa, Artificial Sequence
  Description of Artificial Sequence: Synthetic peptide
ARAGGAVAGLDY

SEQ ID NO: 2870 - DNA, 325 bp, Artificial Sequence
  Description of Artificial Sequence: Synthetic polynucleotide
gacatccagatgacccagtctccttccaccctgtctgcatctgtaggagacagagtcaccatcacttgccgggccagtcagagtattaatagttggttggcctggtatcagcagaaaccagggaaagcccctaagctcctgatctataaggcgtctaatttagaaggtggggtcccatcaaggttcagcggcagtggatctgggacagaattcactctcaccatcagcagcctgcagcctgatgattttgcagcttattactgccaacagtataatacttattcgggggggacgttcggccaggggaccaaggtggaaatcaaac

SEQ ID NO: 2871 - protein, 108 aa, Artificial Sequence; identical to SEQ ID NO: 88
  Description of Artificial Sequence: Synthetic polypeptide

SEQ ID NO: 2872 - protein, 10 aa, Artificial Sequence
  Description of Artificial Sequence: Synthetic peptide
QQYNTYSGGT

SEQ ID NO: 2873 - DNA, 361 bp, Artificial Sequence
  Description of Artificial Sequence: Synthetic polynucleotide
caggtgcagctggtggagtctgggggaggcgtggtccagcctgggaggtccctgagactctcctgtgcagcctctggattcacgttcattagctatggcatgcactgggtccgccaggctccaggcaaggggctggagtgggtggcaggtgtatcatatgatggaagtactaaatattatggagactccgtgaagggccgattcaccatctccagagacaattccaagaaaacgctgtatgtgcaaatgaacagcctgagaggggaggacacggctatgtattactgtgcgagagtggctgggagccactcgggcctctttgattactggggccagggaaccctggtcaccgtctcctcag

SEQ ID NO: 2874 - protein, 120 aa, Artificial Sequence
  Description of Artificial Sequence: Synthetic polypeptide
QVQLVESGGGVVQPGRSLRLSCAASGFTFISYGMHWVRQAPGKGLEWVAGVSYDGSTKYYGDSVKGRFTISRDNSKKTLYVQMNSLRGEDTAMYYCARVAGSHSGLFDYWGQGTLVTVSS

SEQ ID NO: 2875 - protein, 13 aa, Artificial Sequence
  Description of Artificial Sequence: Synthetic peptide
ARVAGSHSGLFDY

SEQ ID NO: 2876 - DNA, 334 bp, Artificial Sequence
  Description of Artificial Sequence: Synthetic polynucleotide
cagtctgtgctgactcagtcgccctctgcctctgcctccctgggagcctcggtcaggctcacctgcattctgagcagtgggcacagcagctacaccatcgcgtggcatcaacaacagccagagaagggccctcgctacttgatgaaccttaacagtgatggcagccacaccaaaggggacggcatccctgatcgcttctcaggctccagctctggggctgagcgctacctcaccatctccagcctccagtctgaggatgaggctgactattactgtcagacctggggcactggcattcaggtattcggcggagggaccaaactgaccgtcctag

SEQ ID NO: 2877 - protein, 111 aa, Artificial Sequence
  Description of Artificial Sequence: Synthetic polypeptide
QSVLTQSPSASASLGASVRLTCILSSGHSSYTIAWHQQQPEKGPRYLMNLNSDGSHTKGDGIPDRFSGSSSGAERYLTISSLQSEDEADYYCQTWGTGIQVFGGGTKLTVL

SEQ ID NO: 2878 - protein, 9 aa, Artificial Sequence
  Description of Artificial Sequence: Synthetic peptide
QTWGTGIQV

SEQ ID NO: 2879 - DNA, 379 bp, Artificial Sequence
  Description of Artificial Sequence: Synthetic polynucleotide
caggtgcagctgcaggagtcgggcccaggactggtgaagacttcggagaccctgtccctcacctgcactgcttctggtgcctccctcagtggttacaactggagctggttccggcagcccccaggggggggactgcaatggattggctgtatctttaacagtgggggcaccaagtacaacgcctccctcaagagtcgagtcaccatttcactggaaacgtccaagaacaagttttccctgaagctgacctccgtgaccgctgcggacacggccgtgtattactgtgcgagagaggggggctattgtgctgatggtgtatgctatagtcacggctggttcgacccctggggccagggaaccctggtcaccgtctcctcag

SEQ ID NO: 2880 - protein, 126 aa, Artificial Sequence
  Description of Artificial Sequence: Synthetic polypeptide
QVQLQESGPGLVKTSETLSLTCTASGASLSGYNWSWFRQPPGGGLQWIGCIFNSGGTKYNASLKSRVTISLETSKNKFSLKLTSVTAADTAVYYCAREGGYCADGVCYSHGWFDPWGQGTLVTVSS

SEQ ID NO: 2881 - protein, 20 aa, Artificial Sequence
  Description of Artificial Sequence: Synthetic peptide
AREGGYCADGVCYSHGWFDP

SEQ ID NO: 2882 - DNA, 322 bp, Artificial Sequence
  Description of Artificial Sequence: Synthetic polynucleotide
tcctatgtgctgactcagccaccctcggtgtcagtggccccagggcagacggccaggattacctgtgggggaaacaatattgcaagtaaaactatacactggtaccagcagaggccaggccaggcccctgtgctggtcgtctatcatgataacgaccggccctcagggatccctgaacgattctctggctccaactctgggaacacggccaccctgaccatcagcagggtcgaagccggggatgaggccgactattactgtcagatgtgggatagtagtagtgattatgtcttcggaactgggaccaagctcaccgtcctag

SEQ ID NO: 2883 - protein, 107 aa, Artificial Sequence
  Description of Artificial Sequence: Synthetic polypeptide
SYVLTQPPSVSVAPGQTARITCGGNNIASKTIHWYQQRPGQAPVLVVYHDNDRPSGIPERFSGSNSGNTATLTISRVEAGDEADYYCQMWDSSSDYVFGTGTKLTVL

SEQ ID NO: 2884 - protein, 10 aa, Artificial Sequence
  Description of Artificial Sequence: Synthetic peptide
QMWDSSSDYV

SEQ ID NO: 2885 - DNA, 352 bp, Artificial Sequence
  Description of Artificial Sequence: Synthetic polynucleotide
caggtgcagctggtgcagtctggggctgaggtgaagaagcctgggtcctcggtgaaggtctcctgcacgacttctggaggcaccttcaacacctttactaccacctgggtgcgacaggcccctggacaagggcttgagtggctgggagggatcatccctatctttggtacaataaactacggacagaacttccagggcagagtcacgattagcgcggacgattccacgagcacagcctatttggaactgaatagactgagatctgaggacacggccgtctattactgtgcgagagggcacatggactactttgacgactggggccagggaaccctggtcaccgtctcctcag

SEQ ID NO: 2886 - protein, 117 aa, Artificial Sequence
  Description of Artificial Sequence: Synthetic polypeptide
QVQLVQSGAEVKKPGSSVKVSCTTSGGTFNTFTTTWVRQAPGQGLEWLGGIIPIFGTINYGQNFQGRVTISADDSTSTAYLELNRLRSEDTAVYYCARGHMDYFDDWGQGTLVTVSS

SEQ ID NO: 2887 - protein, 10 aa, Artificial Sequence
  Description of Artificial Sequence: Synthetic peptide
ARGHMDYFDD

SEQ ID NO: 2888 - DNA, 334 bp, Artificial Sequence
  Description of Artificial Sequence: Synthetic polynucleotide
  modified_base (182)..(182): a, c, t, g, unknown or other
cagtctgtgctgactcagcctgcctccgtgtctgggtctcccggacagtcgatcaccatctcctgcactggaatcagcagtgacattggtggtaataagtatgtctcctggttccaacaacacccaggcaaggcccccaaactcatgatttatgaggtcactaatcggccctcaggagtttnttctagtagcaactgcaaccggttcctggtcccagtctgtgctgactcagcctgcctccagcctgacgacgagtctgattattactgcagctcatattcaaccatcagcgctcaactggtattcggcggagggaccaagctgaccgtcctag

SEQ ID NO: 2889 - protein, 111 aa, Artificial Sequence
  Description of Artificial Sequence: Synthetic polypeptide
  MOD_RES (61)..(61): Any amino acid
QSVLTQPASVSGSPGQSITISCTGISSDIGGNKYVSWFQQHPGKAPKLMIYEVTNRPSGVXSSSNCNRFLVPVCADSACLQPDDESDYYCSSYSTISAQLVFGGGTKLTVL

SEQ ID NO: 2890 - protein, 11 aa, Artificial Sequence
  Description of Artificial Sequence: Synthetic peptide
SSYSTISAQLV

SEQ ID NO: 2891 - DNA, 375 bp, Artificial Sequence
  Description of Artificial Sequence: Synthetic polynucleotide
caggtgcagctgcaggagtcgggcccaggactggtgaagccttcacagaccctgttcctcacctgcactgtctctggtgactccatcaacaatggttattactattggaattgggtccgccagcccccagggaagggcctggagtggattggatacatccattacagtgggagcaccaactacaattcgtccctcaagagtcgagttgccatgtcaatagacacgtccaagaagcagttctccctgaggctgaccttcgtgactgccgcagacacggccgtgtattattgtgtcagagataatcccacccgtgaccaatattactactacggaatggacgtctggggccaagggaccacggtcaccgtctcctca

SEQ ID NO: 2892 - protein, 125 aa, Artificial Sequence
  Description of Artificial Sequence: Synthetic polypeptide
QVQLQESGPGLVKPSQTLFLTCTVSGDSINNGYYYWNWVRQPPGKGLEWIGYIHYSGSTNYNSSLKSRVAMSIDTSKKQFSLRLTFVTAADTAVYYCVRDNPTRDQYYYYGMDVWGQGTTVTVSS

SEQ ID NO: 2893 - protein, 17 aa, Artificial Sequence
  Description of Artificial Sequence: Synthetic peptide
VRDNPTRDQYYYYGMDV

SEQ ID NO: 2894 - DNA, 329 bp, Artificial Sequence
  Description of Artificial Sequence: Synthetic polynucleotide
cagtctgtgctgactcagccaccctcagcgtctgggacccccgggcagagggtcaccttctcttgttctggaagcgcctccagcatcggaaataattatgtattctggtaccagcaattcccaggaacggcccccagactcctcatgtataggaatgatcagcggccctcaggggtccctgaccgattctctggctccaagtctggcacctcagcctccctggccatcagtgggctccggtccgaggatgaggctcactattattgtgcatcatgggatgacagtatgaatggttggatgttcggcggagggaccaagctgaccgtcct

SEQ ID NO: 2895 - protein, 109 aa, Artificial Sequence
  Description of Artificial Sequence: Synthetic polypeptide
QSVLTQPPSASGTPGQRVTFSCSGSASSIGNNYVFWYQQFPGTAPRLLMYRNDQRPSGVPDRFSGSKSGTSASLAISGLRSEDEAHYYCASWDDSMNGWMFGGGTKLTV

SEQ ID NO: 2896 - protein, 11 aa, Artificial Sequence
  Description of Artificial Sequence: Synthetic peptide
ASWDDSMNGWM

SEQ ID NO: 2897 - DNA, 361 bp, Artificial Sequence
  Description of Artificial Sequence: Synthetic polynucleotide
caggtgcagctggtggagtctgggggaggcgtggtccagcctgggcggtccctgagactctcctgtgcagcctctggattcactttcagcacctatggcatgcactgggtccgcctggctccaggcaaggggctggagtgggtggcaactatatcaaacgatggaagtgataaatattatatagactccgtgaagggccgattcagcatctccagagacaattccaagaacaccctgtatctgcaaatgaacagcctgggacctaaggacacggctgtatatttctgtgcgagaggaaatggaaactacttcgggattactgaatactggggccagggaaccctggtctccgtctcctcag

SEQ ID NO: 2898 - protein, 120 aa, Artificial Sequence
  Description of Artificial Sequence: Synthetic polypeptide
QVQLVESGGGVVQPGRSLRLSCAASGFTFSTYGMHWVRLAPGKGLEWVATISNDGSDKYYIDSVKGRFSISRDNSKNTLYLQMNSLGPKDTAVYFCARGNGNYFGITEYWGQGTLVSVSS

SEQ ID NO: 2899 - protein, 13 aa, Artificial Sequence
  Description of Artificial Sequence: Synthetic peptide
ARGNGNYFGITEY

SEQ ID NO: 2900 - DNA, 334 bp, Artificial Sequence
  Description of Artificial Sequence: Synthetic polynucleotide
cagcctgtgctgactcagtcatcctctgcctctgcttccctgggatcctcggtcacggtcacctgcactctgagcagtgggcacactaagtacattatcgcatggcatcagcaacaaccagggaaggcccctcggtacttaatgcagcttgaaagtggtgtaagctacaacaaggggagcggtgttcctgatcgcttctcaggctccagctctggcgctgaccgctacctctccatctccaacctccagtctgacgatgaggctgattattactgtgagacctgggacagtactactcgggtcttcggcggagggaccaagctgaccgtcctag

SEQ ID NO: 2901 - protein, 111 aa, Artificial Sequence
  Description of Artificial Sequence: Synthetic polypeptide
QPVLTQSSSASASLGSSVTVTCTLSSGHTKYIIAWHQQQPGKAPRYLMQLESGVSYNKGSGVPDRFSGSSSGADRYLSISNLQSDDEADYYCETWDSTTRVFGGGTKLTVL

SEQ ID NO: 2902 - protein, 9 aa, Artificial Sequence
  Description of Artificial Sequence: Synthetic peptide
ETWDSTTRV

SEQ ID NO: 2903 - DNA, 385 bp, Artificial Sequence
  Description of Artificial Sequence: Synthetic polynucleotide
gaggtgcagctgttggagtctgggggaggcttggtacagccgggggggtccctgagactctcctgcgcagcctctggattcaccttcagcaactatgtcatgaattgggtccgccaggctccagggagggggctggagtgggtctcaggtctcagtggtagtggtgataagatatactacgcagactcggtgaagggccgcttcaccatctccagggacaactccaagaacatcctgtatctgcaaatgaacagcctgagagccgaggacacggccgtatattactgtgcgaaagattggggtcgtaacgatttttggagtggtttcaactggtacaactggttcgacccctggggccagggaaccctgatcaccgtctccccag

SEQ ID NO: 2904 - protein, 128 aa, Artificial Sequence
  Description of Artificial Sequence: Synthetic polypeptide
EVQLLESGGGLVQPGGSLRLSCAASGFTFSNYVMNWVRQAPGRGLEWVSGLSGSGDKIYYADSVKGRFTISRDNSKNILYLQMNSLRAEDTAVYYCAKDWGRNDFWSGFNWYNWFDPWGQGTLITVSP

SEQ ID NO: 2905 - protein, 21 aa, Artificial Sequence
  Description of Artificial Sequence: Synthetic peptide
AKDWGRNDFWSGFNWYNWFDP

SEQ ID NO: 2906 - DNA, 331 bp, Artificial Sequence
  Description of Artificial Sequence: Synthetic polynucleotide
cagtctgtgctgactcagcctgcctccgtgtctgggtctcctggacagtcgatcaccatctcctgcactggaaccagcagtgacgttggtggttatgactatgtctcctggtaccaacaacacccaggcaaagcccccaaactcatcatttatgatgtcaataatcggccctcaggggtctctaatcgcttctctggctccaagtctggcaccacggcctccctgaccatctctgcggtccaggctgaggacgaggctgattattactgcagctcatatacaattagcagcactcgagtcttcggcggcgggaccaaattgaccgtcctag

SEQ ID NO: 2907 - protein, 110 aa, Artificial Sequence
  Description of Artificial Sequence: Synthetic polypeptide
QSVLTQPASVSGSPGQSITISCTGTSSDVGGYDYVSWYQQHPGKAPKLIIYDVNNRPSGVSNRFSGSKSGTTASLTISAVQAEDEADYYCSSYTISSTRVFGGGTKLTVL

SEQ ID NO: 2908 - protein, 10 aa, Artificial Sequence
  Description of Artificial Sequence: Synthetic peptide
SSYTISSTRV

SEQ ID NO: 2909 - DNA, 346 bp, Artificial Sequence
  Description of Artificial Sequence: Synthetic polynucleotide
caggtgcagctggtggagtctgggggaggcgtggtccagcctgggaggtccctgagactctcctgtgcagcctctgggttcaccttcagtcactatcctatgcactggatccgccagcctccaggcaaggggctagagtgggtggccagtgtttcatatgatggaagtcataaatcgtacgcagactccgtgaagggccgactcaccgtctccagagacaattccaagaacaccctgaatctgcaaatgaacagcctgacagctgaggacacggctgtttattactgtgcgagaggtgctggtgattggttttggggccaggggaccctggtcaccgtctcctcag

SEQ ID NO: 2910 - protein, 115 aa, Artificial Sequence
  Description of Artificial Sequence: Synthetic polypeptide
QVQLVESGGGVVQPGRSLRLSCAASGFTFSHYPMHWIRQPPGKGLEWVASVSYDGSHKSYADSVKGRLTVSRDNSKNTLNLQMNSLTAEDTAVYYCARGAGDWFWGQGTLVTVSS

SEQ ID NO: 2911 - protein, 8 aa, Artificial Sequence
  Description of Artificial Sequence: Synthetic peptide
ARGAGDWF

SEQ ID NO: 2912 - DNA, 331 bp, Artificial Sequence
  Description of Artificial Sequence: Synthetic polynucleotide
cagtctgtgctgactcagcctgcctccgtctctgggtctcctggacagtcgatcaccatctcctgcactggaaccagcagtgacgttggtggttataattatgtctcctggtaccaacagtatccaggcaaagcccccaaagtcttgatttatgatgtcagtgatcggccctcaggggtttctaatcgcttctctggctccaagtctggcaacgcggcctccctgaccatttctggactccaggctgaggacgaggctgattattattgcagctcatatacagccagcaccacttggctgttcggcggagggactaagctgaccgtcctag

SEQ ID NO: 2913 - protein, 110 aa, Artificial Sequence
  Description of Artificial Sequence: Synthetic polypeptide
QSVLTQPASVSGSPGQSITISCTGTSSDVGGYNYVSWYQQYPGKAPKVLIYDVSDRPSGVSNRFSGSKSGNAASLTISGLQAEDEADYYCSSYTASTTWLFGGGTKLTVL

SEQ ID NO: 2914 - protein, 10 aa, Artificial Sequence
  Description of Artificial Sequence: Synthetic peptide
SSYTASTTWL

SEQ ID NO: 2915 - DNA, 355 bp, Artificial Sequence
  Description of Artificial Sequence: Synthetic polynucleotide
caggtgcagctggtgcagtctggggctgaggtgaagaagcctgggtcctcggtgaaggtctcctgcaaggcttctggaggcaccttcagcaactatgctatcagctgggtgcgacaggcccctggacaagggcttgagtggatgggagacatcatccctctctttgggacaccaaattacgcacagaggttccagggcagagtcgcgattaccgcggacgcatctacgagcacagcctacttggaactgaccagcctgagatctgacgacacggccgtgtattactgtgcgagagatggaggacaagcgtctttagactactggggccagggaacccgactcaccgtctccacag

SEQ ID NO: 2916 - protein, 118 aa, Artificial Sequence
  Description of Artificial Sequence: Synthetic polypeptide
QVQLVQSGAEVKKPGSSVKVSCKASGGTFSNYAISWVRQAPGQGLEWMGDIIPLFGTPNYAQRFQGRVAITADASTSTAYLELTSLRSDDTAVYYCARDGGQASLDYWGQGTRLTVST

SEQ ID NO: 2917 - protein, 11 aa, Artificial Sequence
  Description of Artificial Sequence: Synthetic peptide
ARDGGQASLDY

SEQ ID NO: 2918 - DNA, 337 bp, Artificial Sequence
  Description of Artificial Sequence: Synthetic polynucleotide
gatattgtgatgactcagtctccactctccctgtccgtcacccctggagagccggcctccatctcctgcaggtctagtcagagtctcctgcatagaagtggatacacctatttggattggtacctgcagaagccagggcagtctccacggctcctgatctatttggcttctaatcgggcctccggggtccctgacaggttcagtggcagtggatcaggcacagattttacactgaaaatcagcagagtggaggctgaggatgtgggcgtttattactgcatgcaagctctacaaactcctaagaccttcggccaagggacacgactggagattaaac

SEQ ID NO: 2919 - protein, 112 aa, Artificial Sequence
  Description of Artificial Sequence: Synthetic polypeptide
DIVMTQSPLSLSVTPGEPASISCRSSQSLLHRSGYTYLDWYLQKPGQSPRLLIYLASNRASGVPDRFSGSGSGTDFTLKISRVEAEDVGVYYCMQALQTPKTFGQGTRLEIK

SEQ ID NO: 2920 - protein, 9 aa, Artificial Sequence
  Description of Artificial Sequence: Synthetic peptide
MQALQTPKT

SEQ ID NO: 2921 - DNA, 358 bp, Artificial Sequence
  Description of Artificial Sequence: Synthetic polynucleotide
gaggtgcagctggtggagtctgggggagggttgggacggcctggggggtccctgagcctctcctgtgcagcctctggattcaccttcagtagtaatagcatgaactgggtccgccaggctccagggaaggggcttcagtgggttgcatacatcagtagtggtagtactgacatttactactcagaggctgtgaagggccgattcaccatctccagagacgatggcaagaactcactgtatctgcaaatgaacagcctgagagtcgacgacacggctatatattactgtgtgactgagactaggagttattccttttttcaacactggggccagggaagcctggtcaccgtctcctcag

SEQ ID NO: 2922 - protein, 119 aa, Artificial Sequence
  Description of Artificial Sequence: Synthetic polypeptide
EVQLVESGGGLGRPGGSLSLSCAASGFTFSSNSMNWVRQAPGKGLQWVAYISSGSTDIYYSEAVKGRFTISRDDGKNSLYLQMNSLRVDDTAIYYCVTETRSYSFFQHWGQGSLVTVSS

SEQ ID NO: 2923 - protein, 12 aa, Artificial Sequence
  Description of Artificial Sequence: Synthetic peptide
VTETRSYSFFQH

SEQ ID NO: 2924 - DNA, 323 bp, Artificial Sequence
  Description of Artificial Sequence: Synthetic polynucleotide
  modified_base (109)..(109): a, c, t, g, unknown or other
gacatccagatgacccagtctccttccaccctgtctgcatctgtgggagacaaagtcaccatcacttgccgggccagtcagaatattcgtacttggttggcctggtatnagcagaaaccagggaaagcccctaacctcctgatctatcaggcgtctagtttagaaagtggggtcccatcaaggttcagcggcagtggatctgggacaacattcactctcaccatcagcagcctgcagcctgatgatattggaacttatttctgccaacagtataatactttttctgcgctcactttcggcggggggaccaaggtggagatcaa

SEQ ID NO: 2925 - protein, 107 aa, Artificial Sequence
  Description of Artificial Sequence: Synthetic polypeptide
  MOD_RES (37)..(37): Any amino acid
DIQMTQSPSTLSASVGDKVTITCRASQNIRTWLAWYXQKPGKAPNLLIYQASSLESGVPSRFSGSGSGTTFTLTISSLQPDDIGTYFCQQYNTFSALTFGGGTKVEI

SEQ ID NO: 2926 - protein, 10 aa, Artificial Sequence
  Description of Artificial Sequence: Synthetic peptide
QQYNTFSALT

SEQ ID NO: 2927 - DNA, 343 bp, Artificial Sequence
  Description of Artificial Sequence: Synthetic polynucleotide
caggtgcagctggtggagtctgggggaggcgtggtccagcctgggaggtccctgagactctcctgtgcagcctctggattcaccttcagtagacatggaatgcactgggtccgccaggctccaggccaggggctagagtggatggcatttatatcatatgatggaggttatacttactacgcagactccgtgaagggccgattcatcatctccagagacgattccaagaacacgctgtatctgcaaatgaacagcctgagaggtgaggacacggctgtgtattactgtgcgagatccccctggtggaactggggccagggaaccctggtcatcgtctcctcag

SEQ ID NO: 2928 - protein, 114 aa, Artificial Sequence
  Description of Artificial Sequence: Synthetic polypeptide
QVQLVESGGGVVQPGRSLRLSCAASGFTFSRHGMHWVRQAPGQGLEWMAFISYDGGYTYYADSVKGRFIISRDDSKNTLYLQMNSLRGEDTAVYYCARSPWWNWGQGTLVIVSS

SEQ ID NO: 2929 - protein, 7 aa, Artificial Sequence
  Description of Artificial Sequence: Synthetic peptide
ARSPWWN

SEQ ID NO: 2930 - DNA, 322 bp, Artificial Sequence
  Description of Artificial Sequence: Synthetic polynucleotide
gccatccagttgacccagtctccatcctccctgtctgcatctgtaggagacagagtcaccatcacttgccgggcaagtcagggcattagcagtggtttagcctggtatcagcagaaagcagggagaactcctaagctcctgatctatgatgcctccagtttggaaagtggggtcccatcaaggttcagcggcagtggatctggaacagatttcactctcaccatcagcagcctgcagcctgaagattttgcaacttattactgtcaacagtttaattcttacccaatcaccttcggccaagggacacgactggaaattaaac

SEQ ID NO: 2931 - protein, 107 aa, Artificial Sequence
  Description of Artificial Sequence: Synthetic polypeptide
AIQLTQSPSSLSASVGDRVTITCRASQGISSGLAWYQQKAGRTPKLLIYDASSLESGVPSRFSGSGSGTDFTLTISSLQPEDFATYYCQQFNSYPITFGQGTRLEIK

SEQ ID NO: 2932 - protein, 9 aa, Artificial Sequence
  Description of Artificial Sequence: Synthetic peptide
QQFNSYPIT

SEQ ID NO: 2933 - DNA, 355 bp, Artificial Sequence
  Description of Artificial Sequence: Synthetic polynucleotide
caggtgcagctggtgcagtctggggctgaggtgaagacgcctggggcctcagtgaaggtttcctgcaaggcatctggatacaccttcaccaactactctatgcactgggtgcgacaggcccctggacaaggccttgagtggatgggaataatcaaccctagtggtggtagcacaagttacgcactgaagtttgagggcagagtcaccatgaccagggacacgtccacgagcacagtctacatggagctgagcagcctgagatctgaggacacggccgtgtattactgtgctcgacctaccagtggctggtcctttgaatactggggccagggaaccctggtcaccgtctcctcag

SEQ ID NO: 2934 - protein, 118 aa, Artificial Sequence
  Description of Artificial Sequence: Synthetic polypeptide
QVQLVQSGAEVKTPGASVKVSCKASGYTFTNYSMHWVRQAPGQGLEWMGIINPSGGSTSYALKFEGRVTMTRDTSTSTVYMELSSLRSEDTAVYYCARPTSGWSFEYWGQGTLVTVSS

SEQ ID NO: 2935 - protein, 11 aa, Artificial Sequence
  Description of Artificial Sequence: Synthetic peptide
ARPTSGWSFEY

SEQ ID NO: 2936 - DNA, 310 bp, Artificial Sequence
  Description of Artificial Sequence: Synthetic polynucleotide
gaaatagtgatgacgcagtctccagccaccctgtctgtgtctccaggggaaagagccaccctctcctgcagggccagtcagagtgttcgcagcaacttagcctggtaccaacaaaaacctggccaggctcccaggctcctcatctatggtgcatccaccagggccactggtatcccagccaggttcagtggcagtgggtctgggacagagttcactctcaccatcagcagcctgcaggctgaagattctgcagtttattactgtcagcagtatggggccttcggccaagggacacgactggagattaaac

SEQ ID NO: 2937 - protein, 103 aa, Artificial Sequence
  Description of Artificial Sequence: Synthetic polypeptide
EIVMTQSPATLSVSPGERATLSCRASQSVRSNLAWYQQKPGQAPRLLIYGASTRATGIPARFSGSGSGTEFTLTISSLQAEDSAVYYCQQYGAFGQGTRLEIK

SEQ ID NO: 2938 - protein, 5 aa, Artificial Sequence
  Description of Artificial Sequence: Synthetic peptide
QQYGA

SEQ ID NO: 2939 - DNA, 355 bp, Artificial Sequence
  Description of Artificial Sequence: Synthetic polynucleotide
caggtgcagctggtgcagtctggggctgaggtgaagaagcctgggtcctcggtgaaggtctcctgcaaggcttctggaggccccttcagcaactatgctatcagctgggtgcgacaggcccctggacaaggctttgagtggatgggagggatcatccctgcctttggcactgcaaattatgcacggaggttccagggcagagtcacgattaccgcggacgaatccacgagcacagcctacatggagttgagaagcctgagatctgaggacacggccgtgtattattgtgcgagagatgcaggggtatcagtggctgactactggggccagggaaccctggtcaccgtctcctcag

SEQ ID NO: 2940 - protein, 118 aa, Artificial Sequence
  Description of Artificial Sequence: Synthetic polypeptide
QVQLVQSGAEVKKPGSSVKVSCKASGGPFSNYAISWVRQAPGQGFEWMGGIIPAFGTANYARRFQGRVTITADESTSTAYMELRSLRSEDTAVYYCARDAGVSVADYWGQGTLVTVSS

SEQ ID NO: 2941 - protein, 11 aa, Artificial Sequence
  Description of Artificial Sequence: Synthetic peptide
ARDAGVSVADY

SEQ ID NO: 2942 - DNA, 337 bp, Artificial Sequence
  Description of Artificial Sequence: Synthetic polynucleotide
gatattgtgatgactcagtctccactctccctgcccgtcacccctggagagccggcctccatctcctgcaggtctagtcagagcctcctacatagaagtggatacacctatttgaattggtacctgcagaagccagggcagtctccacagctcctgatctatttgggatctaatcgggcctccggggtccctgacaggttcagtggcagtggatcaggcacagattttacactgaaaatcagcggagtggaggctgaggatgttggggtttattactgcatgcaagctctacaaactccgtggacgttcggccaagggaccaaggtggaaatcaaac

SEQ ID NO: 2943 - protein, 112 aa, Artificial Sequence
  Description of Artificial Sequence: Synthetic polypeptide
DIVMTQSPLSLPVTPGEPASISCRSSQSLLHRSGYTYLNWYLQKPGQSPQLLIYLGSNRASGVPDRFSGSGSGTDFTLKISGVEAEDVGVYYCMQALQTPWTFGQGTKVEIK

SEQ ID NO: 2944 - protein, 9 aa, Artificial Sequence
  Description of Artificial Sequence: Synthetic peptide
MQALQTPWT

SEQ ID NO: 2945 - DNA, 349 bp, Artificial Sequence
  Description of Artificial Sequence: Synthetic polynucleotide
caggtgcagctggtgcagtctggggctgaggtgaagaagcctgggtcctcggtgaaggtctcctgcaaggcttctggaggcaccttcagaaattttcctttcagttgggtgcgacaggcccctggacaaggacttgagtggatgggagggctcatacctacctttggtacaccaaactacgcacagaagttccaggacagagtcacgattagcgcggacatatccacgagcacagtctacatggagctgagcagcctgagatctgacgacacggccttttattactgtgcgactggatacagttatggtgactactggggccagggaaccctggtcaccgtctcctcag

SEQ ID NO: 2946 - protein, 116 aa, Artificial Sequence
  Description of Artificial Sequence: Synthetic polypeptide
QVQLVQSGAEVKKPGSSVKVSCKASGGTFRNFPFSWVRQAPGQGLEWMGGLIPTFGTPNYAQKFQDRVTISADISTSTVYMELSSLRSDDTAFYYCATGYSYGDYWGQGTLVTVSS

SEQ ID NO: 2947 - protein, 9 aa, Artificial Sequence
  Description of Artificial Sequence: Synthetic peptide
ATGYSYGDY

SEQ ID NO: 2948 - DNA, 325 bp, Artificial Sequence
  Description of Artificial Sequence: Synthetic polynucleotide
gacatccagatgacccagtctccatcctccctgtctgcatctgtaggagacagagtcaccatcacttgccaggcgagtcaggacattaacaaatacttaaattggtatcagcaaaaaccagggaaagcccctaagctcctgatctacgatgcatccaatttggaaacaggggtcccatcaaggttcagtggaagtggatctgggacagattttactttcaccatcagcagcctgcagcctgaagattttgcaacatattactgtcaacaatatgataatcttcgtcggctcactttcggcggagggaccaaggtggaggtcaaac

SEQ ID NO: 2949 - protein, 108 aa, Artificial Sequence
  Description of Artificial Sequence: Synthetic polypeptide
DIQMTQSPSSLSASVGDRVTITCQASQDINKYLNWYQQKPGKAPKLLIYDASNLETGVPSRFSGSGSGTDFTFTISSLQPEDFATYYCQQYDNLRRLTFGGGTKVEVK

SEQ ID NO: 2950 - protein, 10 aa, Artificial Sequence
  Description of Artificial Sequence: Synthetic peptide
QQYDNLRRLT

SEQ ID NO: 2951 - DNA, 355 bp, Artificial Sequence
  Description of Artificial Sequence: Synthetic polynucleotide
caggtgcagctggtgcagtctggggctgaggtgaagaagcctgggtcctcggtgacggtctcctgcaaggtttctggaggcaccttcagcacttatgctatcacatgggtgcgacaggcccctggacaagggcttgagtggatgggagggatcatccctgtctttggtacagcagactacgcacagaagtttcagggcagcgtcacgattaccgcggacatatccacgagcacagcctacatggagctgagtagtctgacatctgaggacacggccgtgtattactgtgcgaggccgtcggggagtgggagcttcgactactggggccagggaaccctggtcaccgtctcctcag

SEQ ID NO: 2952 - protein, 118 aa, Artificial Sequence
  Description of Artificial Sequence: Synthetic polypeptide
QVQLVQSGAEVKKPGSSVTVSCKVSGGTFSTYAITWVRQAPGQGLEWMGGIIPVFGTADYAQKFQGSVTITADISTSTAYMELSSLTSEDTAVYYCARPSGSGSFDYWGQGTLVTVSS

SEQ ID NO: 2953 - protein, 11 aa, Artificial Sequence
  Description of Artificial Sequence: Synthetic peptide
ARPSGSGSFDY

SEQ ID NO: 2954 - DNA, 337 bp, Artificial Sequence
  Description of Artificial Sequence: Synthetic polynucleotide
gatattgtgatgactcagtctccactctccctgcccgtcacccctggagagccggcctccatctcctgcaggtctagtcagagcctcctgcatagtaatggagacaactatttggattggtacctgcagaagccagggcagtctccacagctcctgatctatttgggttcttatcgggcctccggggtccctgacaggttcagtggtagtggatcagacacagactttacactgaaaatcagcagagtggaggctggggatgttggggtttattactgcatgcaagctctacgaactcctcatacttttggccaggggaccaagctggagatcaaac

SEQ ID NO: 2955 - protein, 112 aa, Artificial Sequence
  Description of Artificial Sequence: Synthetic polypeptide
DIVMTQSPLSLPVTPGEPASISCRSSQSLLHSNGDNYLDWYLQKPGQSPQLLIYLGSYRASGVPDRFSGSGSDTDFTLKISRVEAGDVGVYYCMQALRTPHTFGQGTKLEIK

SEQ ID NO: 2956 - protein, 9 aa, Artificial Sequence
  Description of Artificial Sequence: Synthetic peptide
MQALRTPHT

SEQ ID NO: 2957 - DNA, 393 bp, Artificial Sequence
  Description of Artificial Sequence: Synthetic polynucleotide
caggtgcagctggtggagtctgggggaggcttggtcaagcctggagggtccctgagactctcctgtgtagcctctggattcaccttcagtgactactatatgagctggatccgccaggctccagggaaggggctggagtggctttcagacattagtagtggtggtgatatcatatactacgcagactctgtgaagggccgattcaccatctccagggacaacgccaagaactcactgtttctgcaaatgaacaacctgagagccgaggacacggccctgtattactgtgcgagagattttcaacgcctatcaggggcgtacagcagttggacgccctactactactactacatggacgtctggggcgaagggaccacggtcaccgtctcctca

SEQ ID NO: 2958 - protein, 131 aa, Artificial Sequence
  Description of Artificial Sequence: Synthetic polypeptide
QVQLVESGGGLVKPGGSLRLSCVASGFTFSDYYMSWIRQAPGKGLEWLSDISSGGDIIYYADSVKGRFTISRDNAKNSLFLQMNNLRAEDTALYYCARDFQRLSGAYSSWTPYYYYYMDVWGEGTTVTVSS

SEQ ID NO: 2959 - protein, 24 aa, Artificial Sequence
  Description of Artificial Sequence: Synthetic peptide
ARDFQRLSGAYSSWTPYYYYYMDV

SEQ ID NO: 2960 - DNA, 325 bp, Artificial Sequence
  Description of Artificial Sequence: Synthetic polynucleotide
gacatccagatgacccagtctccatcctccctgtctgcatctgtaggagacagagtcaccatcacttgccggacaagtcagagcattagcacctatttaaattggtatcagcagagaccagggaaagcccctaaactcctgatctatggtgcatccactttgcacaggggggtcccatcaaggttcagtggcagtggatctgggacagatttcattctcaccatcagcagtctgcaacctgaagattttgcaacttactactgtcaacagagttacagtaccccccgactcaccttcggccctgggaccaaagtggatgtcaaac

SEQ ID NO: 2961 - protein, 108 aa, Artificial Sequence
  Description of Artificial Sequence: Synthetic polypeptide
DIQMTQSPSSLSASVGDRVTITCRTSQSISTYLNWYQQRPGKAPKLLIYGASTLHRGVPSRFSGSGSGTDFILTISSLQPEDFATYYCQQSYSTPRLTFGPGTKVDVK

SEQ ID NO: 2962 - protein, 10 aa, Artificial Sequence
  Description of Artificial Sequence: Synthetic peptide
QQSYSTPRLT

SEQ ID NO: 2963 - DNA, 358 bp, Artificial Sequence
  Description of Artificial Sequence: Synthetic polynucleotide
caggtgcagctggtgcagtctggggctgaggtgaagaagcctggggcctcagtgcgggtctcctgtaggacttctggatcctccttcaccgactatttcctccactgggtgcgacaggcccctggccaagggcttgagtggatgggatggatcaaccctaacagtggtggcacatcctatacccagaagtttcagggcagggtcaccatgacctgggacacgtccataagcacggccttcatggacctgagcaggctcacatctgacgacacggccatatattattgtgcgaaccggaaagatgtttggagtggttttgactactggggccagggaaccctggtcaccgtctcctcag

SEQ ID NO: 2964 - protein, 119 aa, Artificial Sequence
  Description of Artificial Sequence: Synthetic polypeptide
QVQLVQSGAEVKKPGASVRVSCRTSGSSFTDYFLHWVRQAPGQGLEWMGWINPNSGGTSYTQKFQGRVTMTWDTSISTAFMDLSRLTSDDTAIYYCANRKDVWSGFDYWGQGTLVTVSS

SEQ ID NO: 2965 - protein, 12 aa, Artificial Sequence
  Description of Artificial Sequence: Synthetic peptide
ANRKDVWSGFDY

SEQ ID NO: 2966 - DNA, 319 bp, Artificial Sequence
  Description of Artificial Sequence: Synthetic polynucleotide
gaaatagtgatgacgcagtctccagccaccctgtctgtgtctccaggggaaagagccaccctctcctgcagggccagtcagactgtttacagcaacttagcctggtaccagcacaaacctggccaggctcccaggctcctcatctattatgcatccaccagggccactggcatcccagccaggttcagtggcagtgggtctgggacagagttcactctcaccatcagcagcctgcagtctgaagatattgcagtttattactgtcagcagtataataattttttcactttcggccctgggaccaaagtgggtatcaaac

SEQ ID NO: 2967 - protein, 106 aa, Artificial Sequence
  Description of Artificial Sequence: Synthetic polypeptide
EIVMTQSPATLSVSPGERATLSCRASQTVYSNLAWYQHKPGQAPRLLIYYASTRATGIPARFSGSGSGTEFTLTISSLQSEDIAVYYCQQYNNFFTFGPGTKVGIK

SEQ ID NO: 2968 - protein, 8 aa, Artificial Sequence
  Description of Artificial Sequence: Synthetic peptide
QQYNNFFT

SEQ ID NO: 2969 - DNA, 364 bp, Artificial Sequence
  Description of Artificial Sequence: Synthetic polynucleotide
caggtgcagctggtgcagtctggggctgaggtgaagaagcctgggtcgtcggtgaaggtctcctgcagggcttctggaggcagcaaatatgctgtcagctgggtgcgacaggcccctggacaaggccttgaatggatgggagagatcattccttattttggtacagcaaattacgcacagaagttccagggcagggtcacgattaccgcggacgagtccacgagcacagcctacatggagctgagcagcctgagatctgaggacacggccgtgtattactgtgcgaaagacttcccgtattactatgacagtagtggctattctcaatattggggtcagggaaccctggtcaccgtctcctcag

SEQ ID NO: 2970 - protein, 121 aa, Artificial Sequence
  Description of Artificial Sequence: Synthetic polypeptide
QVQLVQSGAEVKKPGSSVKVSCRASGGSKYAVSWVRQAPGQGLEWMGEIIPYFGTANYAQKFQGRVTITADESTSTAYMELSSLRSEDTAVYYCAKDFPYYYDSSGYSQYWGQGTLVTVSS

SEQ ID NO: 2971 - protein, 16 aa, Artificial Sequence
  Description of Artificial Sequence: Synthetic peptide
AKDFPYYYDSSGYSQY

SEQ ID NO: 2972 - DNA, 319 bp, Artificial Sequence
  Description of Artificial Sequence: Synthetic polynucleotide
gaaattgtgttgacacagtctccagccaccctgtctttgtctccaggggaaagagccaccctttcctgcagggccagtcagagtgttagcagctacatagcctggtaccaacaaagacgtggccaggctcccaggctcctcatctatgatgcttccaagagggccacaggcatcccagccaggttcactggcagtgggtctgggacagacttcactctcaccatcaccagcctggagcctgaagattttgcagtttattactgtcagcaacgtagcagccggcggacttttggccaggggaccaagctggagatcaaac

SEQ ID NO: 2973 - protein, 106 aa, Artificial Sequence
  Description of Artificial Sequence: Synthetic polypeptide
EIVLTQSPATLSLSPGERATLSCRASQSVSSYIAWYQQRRGQAPRLLIYDASKRATGIPARFTGSGSGTDFTLTITSLEPEDFAVYYCQQRSSRRTFGQGTKLEIK

SEQ ID NO: 2974 - protein, 8 aa, Artificial Sequence
  Description of Artificial Sequence: Synthetic peptide
QQRSSRRT

SEQ ID NO: 2975 - DNA, 390 bp, Artificial Sequence
  Description of Artificial Sequence: Synthetic polynucleotide
  modified_base (125)..(125): a, c, t, g, unknown or other
gaggtgcagctggtggagtctgggggaggcttggtccagccgggggggtccctgagactctcctgtgcagcctctggattcacctttagtagttattggatgacctgggtccgccaggctccagngaaggggctggagtgggtggccaacataattcaagatggaagtgtgaaatactctgtggactctgtgaagggccgattcaccatctccagagacaacgccaagaactcactgtatctgcaaatgaacagcctgagagccgaggacacggctgtgtattactgtgtgagagatggatcaacagaggccgcaccacatcctgatagaccctactactactactacatggacgtctggggcaaagggaccacggtcaccgtctcctca

SEQ ID NO: 2976 - protein, 130 aa, Artificial Sequence
  Description of Artificial Sequence: Synthetic polypeptide
  MOD_RES (42)..(42): Any amino acid
EVQLVESGGGLVQPGGSLRLSCAASGFTFSSYWMTWVRQAPXKGLEWVANIIQDGSVKYSVDSVKGRFTISRDNAKNSLYLQMNSLRAEDTAVYYCVRDGSTEAAPHPDRPYYYYYMDVWGKGTTVTVSS

SEQ ID NO: 2977 - protein, 23 aa, Artificial Sequence
  Description of Artificial Sequence: Synthetic peptide
VRDGSTEAAPHPDRPYYYYYMDV

SEQ ID NO: 2978 - DNA, 325 bp, Artificial Sequence
  Description of Artificial Sequence: Synthetic polynucleotide
gacatccagatgacccagtctccatcctccctgtctgcatctgtaggagacagagtcaccatgacttgccgggcaagtcagagcatttacaactatgtaaattggtatcagcagaaaccagggaaagcccctaagctcctgatctatgctgcatccagtttgcgaggtggggtcccatcaaggttcagtggcagtggatctgggacagatttcactctcaccatcagcagtctgcaacctgaagatgttgcgacttactactgtcaacagagttacagtacccctgcgctcactttcggcggagggaccaaggtggagctcaaac

SEQ ID NO: 2979 - protein, 108 aa, Artificial Sequence
  Description of Artificial Sequence: Synthetic polypeptide
DIQMTQSPSSLSASVGDRVTMTCRASQSIYNYVNWYQQKPGKAPKLLIYAASSLRGGVPSRFSGSGSGTDFTLTISSLQPEDVATYYCQQSYSTPALTFGGGTKVELK

SEQ ID NO: 2980 - protein, 10 aa, Artificial Sequence
  Description of Artificial Sequence: Synthetic peptide
QQSYSTPALT

SEQ ID NO: 2981 - DNA, 355 bp, Artificial Sequence
  Description of Artificial Sequence: Synthetic polynucleotide
caggtgcagctggtgcagtctggggctgaggtgaagaagcctgggtcctcggtgaaggtctcctgcaagggttctggaggcaccttcagcaactatgttatcaactgggtgcgagaggcccctggacaagggcttgagtggatgggagggatcatccctatctttggtacaacaaactacgcacagaagttccggggcagagtcacgattaccgcggacaaatccacgagcacagcctacatggagttgagcaggctgagatctgaggacacggccgtgtattactgtgcgagagattttggtagtacggggggggcctactggggccagggaaccctggtcaccgtctcctcag

SEQ ID NO: 2982 - protein, 118 aa, Artificial Sequence
  Description of Artificial Sequence: Synthetic polypeptide
QVQLVQSGAEVKKPGSSVKVSCKGSGGTFSNYVINWVREAPGQGLEWMGGIIPIFGTTNYAQKFRGRVTITADKSTSTAYMELSRLRSEDTAVYYCARDFGSTGGAYWGQGTLVTVSS

SEQ ID NO: 2983 - protein, 11 aa, Artificial Sequence
  Description of Artificial Sequence: Synthetic peptide
ARDFGSTGGAY

SEQ ID NO: 2984 - DNA, 325 bp, Artificial Sequence
  Description of Artificial Sequence: Synthetic polynucleotide
gacatccagatgacccagtctccatcctccctgtctgcatctgtaggagacagagtcaccatcacttgccaggcgagtcaggacattagcaactatttaaattggtatcagaagaaaccagggaaagcccctaagctcctgatctacgattcatccaatttggaaacaggggtcccatcaaggttcagtggaagtggatctgggacagattttactttcaccatcagcagtctgcagcctgaagatattgcaacatattactgtcaacagtatgataatctccctcgactcactttcggcggagggaccaaggtggagatcaaac

SEQ ID NO: 2985 - protein, 108 aa, Artificial Sequence
  Description of Artificial Sequence: Synthetic polypeptide
DIQMTQSPSSLSASVGDRVTITCQASQDISNYLNWYQKKPGKAPKLLIYDSSNLETGVPSRFSGSGSGTDFTFTISSLQPEDIATYYCQQYDNLPRLTFGGGTKVEIK

SEQ ID NO: 2986 - protein, 10 aa, Artificial Sequence
  Description of Artificial Sequence: Synthetic peptide
QQYDNLPRLT

SEQ ID NO: 2987 - DNA, 363 bp, Artificial Sequence
  Description of Artificial Sequence: Synthetic polynucleotide
caggtgcagctggtggagtctgggggaggcgtggtccagcctgggacgtccctgagactctcctgtgcagcctctggattcaccttcagcgcctttgctatgcactgggtccgccaggctccaggcaaggggctagagtgggtggcagtcatatcaagtgatgaaagtcaaatagaatatggagactccgtgaagggccgattcgccatctcccgagacaatttcaagaacactctgtatctgcacatgaacagcgtgagacctgacgacacggctgtctactactgtgcgagggataccagtgactgggtggataactactttgcctcctggggccaggggaccctggtcaccgtctcctca

SEQ ID NO: 2988 - protein, 121 aa, Artificial Sequence
  Description of Artificial Sequence: Synthetic polypeptide
QVQLVESGGGVVQPGTSLRLSCAASGFTFSAFAMHWVRQAPGKGLEWVAVISSDESQIEYGDSVKGRFAISRDNFKNTLYLHMNSVRPDDTAVYYCARDTSDWVDNYFASWGQGTLVTVSS

SEQ ID NO: 2989 - protein, 14 aa, Artificial Sequence
  Description of Artificial Sequence: Synthetic peptide
ARDTSDWVDNYFAS

SEQ ID NO: 2990 - DNA, 319 bp, Artificial Sequence
  Description of Artificial Sequence: Synthetic polynucleotide
gaaatagtgatgacgcagtctccagccaccctgtctgtgtctccaggggaaagcgccaccctctcctgcagggccagtcagagagttagtagcaacttagcctggtaccagcagaagtctggccaggctcccagactcctcatctatggtgcatccaccagggccagtggtatcccagccaggttcagtggcagtgggtctgggacagagttcactctcaccatcagcagcctgcagtctggagattttgcagtttattactgtcagcagtatgattattggccgctcactttcggcggagggaccaaggtggagatca

SEQ ID NO: 2991 - protein, 106 aa, Artificial Sequence
  Description of Artificial Sequence: Synthetic polypeptide
EIVMTQSPATLSVSPGESATLSCRASQRVSSNLAWYQQKSGQAPRLLIYGASTRASGIPARFSGSGSGTEFTLTISSLQSGDFAVYYCQQYDYWPLTFGGGTKVEI

SEQ ID NO: 2992 - protein, 9 aa, Artificial Sequence
  Description of Artificial Sequence: Synthetic peptide
QQYDYWPLT

SEQ ID NO: 2993 - DNA, 358 bp, Artificial Sequence
  Description of Artificial Sequence: Synthetic polynucleotide
caggtgcagctggtgcagtctggggcagagatgaagaagcctgggtcctcggtgaaggtctcctgcaaggcttctggaggcaccttcagtaactatcctattagctgggtgcgacaggcccctggacaagggcttgagtggatgggatggatcatccctttttttggtacaccaaagtacgcacagaagttccagggtagagtcaccatcaccgcggacgaatccacgagtacagggtttatggaactgaggagcctgacagctgaagacacggccgtctatttttgtgtaagaggggcgggagccaccggggattttgactactggggccagggaaccctggtcaccgtctcctcag

SEQ ID NO: 2994 - protein, 119 aa, Artificial Sequence
  Description of Artificial Sequence: Synthetic polypeptide
QVQLVQSGAEMKKPGSSVKVSCKASGGTFSNYPISWVRQAPGQGLEWMGWIIPFFGTPKYAQKFQGRVTITADESTSTGFMELRSLTAEDTAVYFCVRGAGATGDFDYWGQGTLVTVSS

SEQ ID NO: 2995 - protein, 12 aa, Artificial Sequence
  Description of Artificial Sequence: Synthetic peptide
VRGAGATGDFDY

SEQ ID NO: 2996 - DNA, 337 bp, Artificial Sequence
  Description of Artificial Sequence: Synthetic polynucleotide
  modified_base (25)..(25): a, c, t, g, unknown or other
gatattgtgatgactcagtctccantctccctgcccgtcacccctggagagccggcctccatctcctgcaggtctagtcagagcctcctgcaccgtgatggaaacaactatttgaattggttcctgcagaagccagggcagtctccacagctcctgatctatttgggttctaaccgggcctccggggtccctgccaggttcagtggcagtggttcaggcacagattttacactgaagatcagcagagtggaggctgaggatgttggggttttttactgcatgcaaggtcttcaagctccgtacacttttggccaggggaccaagctggagatcaaac

SEQ ID NO: 2997 - protein, 112 aa, Artificial Sequence
  Description of Artificial Sequence: Synthetic polypeptide
  MOD_RES (9)..(9): Any amino acid
DIVMTQSPXSLPVTPGEPASISCRSSQSLLHRDGNNYLNWFLQKPGQSPQLLIYLGSNRASGVPARFSGSGSGTDFTLKISRVEAEDVGVFYCMQGLQAPYTFGQGTKLEIK

SEQ ID NO: 2998 - protein, 9 aa, Artificial Sequence
  Description of Artificial Sequence: Synthetic peptide
MQGLQAPYT

SEQ ID NO: 2999 - DNA, 355 bp, Artificial Sequence
  Description of Artificial Sequence: Synthetic polynucleotide
caggtgcagctggtgcagtctggagctgaggtgaagaagcctgggtcctcggtgaaagtctcctgcaaggcttctggaggcaccttcagcaactatgctttcaactgggttcgacaggcccctggacaaggacttgagtggatgggagggatcatccctgtttttggtaaactaaactacgcacagaagttccagggcagagtcacgattaccgcggacaaatccacgagcacagcctccatggaactgaacaacctgagatctgaggacacggccgtgtattactgtgcgagagcggtgggatctactgggggggactactggggccagggaaccctggtcaccgtctcctcag

SEQ ID NO: 3000 - protein, 118 aa, Artificial Sequence
  Description of Artificial Sequence: Synthetic polypeptide
QVQLVQSGAEVKKPGSSVKVSCKASGGTFSNYAFNWVRQAPGQGLEWMGGIIPVFGKLNYAQKFQGRVTITADKSTSTASMELNNLRSEDTAVYYCARAVGSTGGDYWGQGTLVTVSS

SEQ ID NO: 3001 - protein, 11 aa, Artificial Sequence
  Description of Artificial Sequence: Synthetic peptide
ARAVGSTGGDY

SEQ ID NO: 3002 - DNA, 325 bp, Artificial Sequence
  Description of Artificial Sequence: Synthetic polynucleotide
gacatccagatgacccagtctccatcctccctgtctgcatctgtaggagacagagtcaccatcacttgccaggcgagtcaggacattagcaactttttaaattggtatcagaagaaaccagggaaagcccctaaggtcctgatctacgatgcatccaatttggaaacaggggtcccatcaaggttcagtggaagtggatctgggacagattttactttcaccatcagcagcctgcagcctgaagatattgcaacatattactgtcaacagtatgataatctccctcggttcactttcggcggagggaccaaggtggagatcaaac

SEQ ID NO: 3003 - protein, 108 aa, Artificial Sequence
  Description of Artificial Sequence: Synthetic polypeptide
DIQMTQSPSSLSASVGDRVTITCQASQDISNFLNWYQKKPGKAPKVLIYDASNLETGVPSRFSGSGSGTDFTFTISSLQPEDIATYYCQQYDNLPRFTFGGGTKVEIK

SEQ ID NO: 3004 - protein, 10 aa, Artificial Sequence
  Description of Artificial Sequence: Synthetic peptide
QQYDNLPRFT

SEQ ID NO: 3005 - DNA, 355 bp, Artificial Sequence
  Description of Artificial Sequence: Synthetic polynucleotide
caggtgcagctggtgcagtctggggctgaggtgaagaagcctgggtcttcggtgaaggtctcctgcaaggcttctggaggcaccttcagcaactacgatatcagctgggtgcgacaggtccctggacaagggcttgaatggatgggagggctcatacccttctttggcacaccaaagtacactcacaaattccagggcagagtcacgattaccgcggacgagtccacgaccacagcctacatggaactgaggaacctaaaagatgaagacaccggcgtctattactgtgcgagagacgatggaactgcaagctttggctactggggccagggaaccctggtcaccgtctcctcag

SEQ ID NO: 3006 - protein, 118 aa, Artificial Sequence
  Description of Artificial Sequence: Synthetic polypeptide
QVQLVQSGAEVKKPGSSVKVSCKASGGTFSNYDISWVRQVPGQGLEWMGGLIPFFGTPKYTHKFQGRVTITADESTTTAYMELRNLKDEDTGVYYCARDDGTASFGYWGQGTLVTVSS

SEQ ID NO: 3007 - protein, 11 aa, Artificial Sequence
  Description of Artificial Sequence: Synthetic peptide
ARDDGTASFGY

SEQ ID NO: 3008 - DNA, 337 bp, Artificial Sequence
  Description of Artificial Sequence: Synthetic polynucleotide
gatattgtgatgactcagtctccactctccctgcccgtcacccctggagagtcggcctccatctcctgcagggctagtcagagcctcctgcataggagtggatacacctatttggattggtacctgcagaagccagggcagtctccacagctcctgatctatttgagttctaatcgggcctccggggtccctgacaggttcagtggcagtggatcaggcacagattttacactgagaatcagcagagtggaggctgaggatgttggggtttattactgcatgcaagctctacaaactcctcggacctttggccaggggaccaagctggagatcaaac

SEQ ID NO: 3009 - protein, 112 aa, Artificial Sequence
  Description of Artificial Sequence: Synthetic polypeptide
DIVMTQSPLSLPVTPGESASISCRASQSLLHRSGYTYLDWYLQKPGQSPQLLIYLSSNRASGVPDRFSGSGSGTDFTLRISRVEAEDVGVYYCMQALQTPRTFGQGTKLEIK

SEQ ID NO: 3010 - protein, 9 aa, Artificial Sequence
  Description of Artificial Sequence: Synthetic peptide
MQALQTPRT

SEQ ID NO: 3011 - DNA, 349 bp, Artificial Sequence
  Description of Artificial Sequence: Synthetic polynucleotide
caggtgcagctggtgcagtctggggctgaggtgcagaagcctgggtcctcggtgaaggtctcctgcacggcttctggaggcaccttcagcaactatggtatcaactgggtgcgacaggcccctggacaagggcttgagtggatgggagagatcatccccatctttggtacagcgaactacgcacagaagttccagggcagagtcaccattaccgcggacgaatccacgaccaccgcctacatggagctgagcagcctgacatctgaggacacggccgtgtattactgtgcgcgaggcgtgtgggggtatgactactggggccagggaaccctggtcaccgtctcctcag

SEQ ID NO: 3012 - protein, 116 aa, Artificial Sequence
  Description of Artificial Sequence: Synthetic polypeptide
QVQLVQSGAEVQKPGSSVKVSCTASGGTFSNYGINWVRQAPGQGLEWMGEIIPIFGTANYAQKFQGRVTITADESTTTAYMELSSLTSEDTAVYYCARGVWGYDYWGQGTLVTVSS

SEQ ID NO: 3013 - protein, 9 aa, Artificial Sequence
  Description of Artificial Sequence: Synthetic peptide
ARGVWGYDY

SEQ ID NO: 3014 - DNA, 325 bp, Artificial Sequence
  Description of Artificial Sequence: Synthetic polynucleotide
gaaattgtgttgacgcagtctccaggcaccctgtctttgtctccaggggaaagagccaccctctcctgcagggccagtcagagtgttaacagcgactatttagcctggtatcagcagaaacctggccaggctcccaggctcctcatctatggtgcatccggcagggccactggcatcccagacaggttcagtggcagtgggtctgggacagacttcactctcaccatcagcagactggagcctgaagactttgcagtgtattactgtcagcactatggtagctcacctagaacgttcggccaagggaccaaggtggaaatcaaac

SEQ ID NO: 3015 - protein, 108 aa, Artificial Sequence
  Description of Artificial Sequence: Synthetic polypeptide
EIVLTQSPGTLSLSPGERATLSCRASQSVNSDYLAWYQQKPGQAPRLLIYGASGRATGIPDRFSGSGSGTDFTLTISRLEPEDFAVYYCQHYGSSPRTFGQGTKVEIK

SEQ ID NO: 3016 - protein, 9 aa, Artificial Sequence
  Description of Artificial Sequence: Synthetic peptide
QHYGSSPRT

SEQ ID NO: 3017 - DNA, 355 bp, Artificial Sequence
  Description of Artificial Sequence: Synthetic polynucleotide
caggtgcagctggtgcagtctggggctgaggtgaagaagcctgggtcctcggtgaaggtctcctgcaaggcttctggaggaggcaccttcagcaactatcctatcaactgggtgcgacaggcccctggacaaggccttgagtggatgggagggatcatccctttctttggcacaccaaactacgcacagaagttccagggcagactcacgattaccgcggacgaatccacgagcacagcctacatgcaactgagcagcctgagatctgacgacacggccatattttactgtgcgagaggagttagtggctggttcacgtactggggccagggaaccctgctcaccgtctcctcag

SEQ ID NO: 3018 - protein, 118 aa, Artificial Sequence
  Description of Artificial Sequence: Synthetic polypeptide
QVQLVQSGAEVKKPGSSVKVSCKASGGGTFSNYPINWVRQAPGQGLEWMGGIIPFFGTPNYAQKFQGRLTITADESTSTAYMQLSSLRSDDTAIFYCARGVSGWFTYWGQGTLLTVSS

SEQ ID NO: 3019 - protein, 10 aa, Artificial Sequence
  Description of Artificial Sequence: Synthetic peptide
ARGVSGWFTY

SEQ ID NO: 3020 - DNA, 322 bp, Artificial Sequence
  Description of Artificial Sequence: Synthetic polynucleotide
gacatccagatgacccagtctccatcctccctgtctgcctctataggagacagagtcaccatcacttgccaggcgagtcaggacattagcgactatttaaattggtatcagcacaaaccagggaaagcccctaagctcctgatctacgatgcggccaatttggaaacaggggtcccatcaaggttcagtggaagtggatctgggacacattttactttcaccatcagcagcctgcagcctgacgatgttgcaacatattactgtcaacagtatgataatctcgtcagcaccttcggccctgggaccaaagtggatatcaaac

SEQ ID NO: 3021 - protein, 107 aa, Artificial Sequence
  Description of Artificial Sequence: Synthetic polypeptide
DIQMTQSPSSLSASIGDRVTITCQASQDISDYLNWYQHKPGKAPKLLIYDAANLETGVPSRFSGSGSGTHFTFTISSLQPDDVATYYCQQYDNLVSTFGPGTKVDIK

SEQ ID NO: 3022 - protein, 9 aa, Artificial Sequence
  Description of Artificial Sequence: Synthetic peptide
QQYDNLVST

SEQ ID NO: 3023 - DNA, 358 bp, Artificial Sequence
  Description of Artificial Sequence: Synthetic polynucleotide
gaggtgcagctggtggagtctgggggaggcttggttcagcctggggggtccctgagactctcctgtgcagcctctggattcaccttcagttcatataacatgaactgggtccgccaggcgccaggaaaggggctgcagtggctttcatatattagtgatactagtagtgagacatattacacagactctgtgaagggccgattcaccatcttcagagacaatgccaagaattcactctatctgcaaatgaacagcctgacagccgcggacacggctgtttactactgtgtgagaccctaccctggctacaatttctttgaccactggggccagggaaccctggtcaccgtctcctcag

SEQ ID NO: 3024 - protein, 119 aa, Artificial Sequence
  Description of Artificial Sequence: Synthetic polypeptide
EVQLVESGGGLVQPGGSLRLSCAASGFTFSSYNMNWVRQAPGKGLQWLSYISDTSSETYYTDSVKGRFTIFRDNAKNSLYLQMNSLTAADTAVYYCVRPYPGYNFFDHWGQGTLVTVSS

SEQ ID NO: 3025 - protein, 12 aa, Artificial Sequence
  Description of Artificial Sequence: Synthetic peptide
VRPYPGYNFFDH

SEQ ID NO: 3026 - DNA, 325 bp, Artificial Sequence
  Description of Artificial Sequence: Synthetic polynucleotide
gacatccagatgacccagtctccttccaccctgtctgcatctgtaggagacagagtcactatcacttgccgggccagtcacactattgttaggtggttggcctggtatcagcagaaaccagggagagcccctaagctcctaatctataaggcgtctaatttagcaagtggggtcccatcaaggttcagcggcagtgggtctgggacagagttcactctcaccatcagcagcctgcagcctgatgattgtgcaacttattactgccaacagtataacacttactcttctatcaccttcggccaagggacacgactggagattaaac

SEQ ID NO: 3027 - protein, 108 aa, Artificial Sequence
  Description of Artificial Sequence: Synthetic polypeptide
DIQMTQSPSTLSASVGDRVTITCRASHTIVRWLAWYQQKPGRAPKLLIYKASNLASGVPSRFSGSGSGTEFTLTISSLQPDDCATYYCQQYNTYSSITFGQGTRLEIK

SEQ ID NO: 3028 - protein, 10 aa, Artificial Sequence
  Description of Artificial Sequence: Synthetic peptide
QQYNTYSSIT

SEQ ID NO: 3029 - DNA, 355 bp, Artificial Sequence
  Description of Artificial Sequence: Synthetic polynucleotide
caggtgcagctggtgcagtctggggctgaggtgaagaagcctgggtcctccgtgaaggtctcctgcaagtcttctggaggcaccttcagcaactttcctctgagctgggtgcgacaggcccctggacaagggcttgagtggatgggagagatcatccctgcctttggcacaccaacgtacgcacagaagttccagggcagagtcacgattatcgcggacgcatctacgagtacatcctacatggacctgagaagcctgagatctgaggacacggccgtgtatttctgtgcgagagtcgacggtttggggtctctggccaactggggccagggaaccctggtcaccgtctcctcag

SEQ ID NO: 3030 - protein, 118 aa, Artificial Sequence
  Description of Artificial Sequence: Synthetic polypeptide
QVQLVQSGAEVKKPGSSVKVSCKSSGGTFSNFPLSWVRQAPGQGLEWMGEIIPAFGTPTYAQKFQGRVTIIADASTSTSYMDLRSLRSEDTAVYFCARVDGLGSLANWGQGTLVTVSS

SEQ ID NO: 3031 - protein, 11 aa, Artificial Sequence
  Description of Artificial Sequence: Synthetic peptide
ARVDGLGSLAN

SEQ ID NO: 3032 - DNA, 337 bp, Artificial Sequence
  Description of Artificial Sequence: Synthetic polynucleotide
gatattgtgatgactcagtctccagtctccctgcccgtcacccctggagagccggcctccatctcctgcaggtctagtcagagcctcctgcatcgtgatggaaacaactatttggattggtacctgcagaagccagggcagtctccacagctcctgatctacttggcttctaatcgggcctccggggtccctgacaggttcagtggcagtggatcaggcacagattttacactgaaaataagcagagtggaggctgaggatgttggggtttattactgcatgcaaactcgacaaactcctcggacgttcggccaagggaccaaggtggaaatcaaac

SEQ ID NO: 3033 - protein, 112 aa, Artificial Sequence
  Description of Artificial Sequence: Synthetic polypeptide
DIVMTQSPVSLPVTPGEPASISCRSSQSLLHRDGNNYLDWYLQKPGQSPQLLIYLASNRASGVPDRFSGSGSGTDFTLKISRVEAEDVGVYYCMQTRQTPRTFGQGTKVEIK

SEQ ID NO: 3034 - protein, 9 aa, Artificial Sequence
  Description of Artificial Sequence: Synthetic peptide
MQTRQTPRT

SEQ ID NO: 3035 - DNA, 349 bp, Artificial Sequence
  Description of Artificial Sequence: Synthetic polynucleotide
caggtgcagctggtgcagtctggggctgaggtgaagaagcctgggtcctcggtgagggtctcctgcaaggcttctggaatcaccttcagccactttcctatcagctgggtgcgacaggcccctggacaagggcttgagtggatgggaggcatcatccctgtctttggtacaaaaaactacgcacagaagttccagggcagactcacgatcaccgcggacgaatccacgagtacagcctacatggagttgaggagcctgagatctgacgacacggccatttatttctgtgcgactggatacagttatggggactactggggccagggaaccctggtcaccgtctcctcag

SEQ ID NO: 3036 - protein, 116 aa, Artificial Sequence
  Description of Artificial Sequence: Synthetic polypeptide
QVQLVQSGAEVKKPGSSVRVSCKASGITFSHFPISWVRQAPGQGLEWMGGIIPVFGTKNYAQKFQGRLTITADESTSTAYMELRSLRSDDTAIYFCATGYSYGDYWGQGTLVTVSS

SEQ ID NO: 3037 - protein, 9 aa, Artificial Sequence
  Description of Artificial Sequence: Synthetic peptide
ATGYSYGDY

SEQ ID NO: 3038 - DNA, 325 bp, Artificial Sequence
  Description of Artificial Sequence: Synthetic polynucleotide
gacatccagatgacccagtctccatcctccctgtctgcatctgtaggggacagagtcaccatcacttgccaggcgagtcaggacattaacaactatttaagttggtatcagcagaaaccagggaaagcccctaagctcctgatctacgatgcatccaatttggaaacaggggtcccatcgaggttcagtgggagtggatctgggacacattttactttcaccatcagcagcctgcagcctgaagatattgcaacatattactgtcaacactataataatctccccctcctcactttcggcggagggaccaaggtggagatcaaac

SEQ ID NO: 3039 - protein, 108 aa, Artificial Sequence
  Description of Artificial Sequence: Synthetic polypeptide
DIQMTQSPSSLSASVGDRVTITCQASQDINNYLSWYQQKPGKAPKLLIYDASNLETGVPSRFSGSGSGTHFTFTISSLQPEDIATYYCQHYNNLPLLTFGGGTKVEIK

SEQ ID NO: 3040 - protein, 10 aa, Artificial Sequence
  Description of Artificial Sequence: Synthetic peptide
QHYNNLPLLT

SEQ ID NO: 3041 - DNA, 405 bp, Artificial Sequence
  Description of Artificial Sequence: Synthetic polynucleotide
gaggtgcagctggtggagtctgggggaggcctggtcaagcctggggggtccctgagactctcctgtgcagcctctggattcacctttagtagttatggcatgaattgggtccgccaggctccagggaaggggctggagtgggtctcattcattagtagtgatagtagttacatgtactacgtagactcagtgaagggccgattcagcatttccagagacaacgccaggaactcagtgtctctacaaatgaacagtctgagagccggggacacggctgtgtattactgtgcgagagagggaagtacccctaatgaagattgcagtggaaacaagtgctatgatgtcccctattattactactacatggacgtctggggcaaagggaccacggtcaccgtctcctca

SEQ ID NO: 3042 - protein, 135 aa, Artificial Sequence
  Description of Artificial Sequence: Synthetic polypeptide
EVQLVESGGGLVKPGGSLRLSCAASGFTFSSYGMNWVRQAPGKGLEWVSFISSDSSYMYYVDSVKGRFSISRDNARNSVSLQMNSLRAGDTAVYYCAREGSTPNEDCSGNKCYDVPYYYYYMDVWGKGTTVTVSS

SEQ ID NO: 3043 - protein, 28 aa, Artificial Sequence
  Description of Artificial Sequence: Synthetic peptide
AREGSTPNEDCSGNKCYDVPYYYYYMDV

SEQ ID NO: 3044 - DNA, 322 bp, Artificial Sequence
  Description of Artificial Sequence: Synthetic polynucleotide
gacatccagatgacccagtctccatcctccctgtctgcatctgtaggagacagagtcaccatcacttgccgggcaagtcagaccatgagcaactttttaaattggtatcagaagaaaccaggggaagcccctaaactcctgatctctgctgcatccaggttgcaaagtggggtcccatcaaggttcagtggcagtggatctgggagagatttcactctcaccatcagcagtctccaacgtgaagactttgctacgtactactgtcaacagagttacggaacccctaccacttttggccaggggaccaaagttgagatcaaac

SEQ ID NO: 3045 - protein, 107 aa, Artificial Sequence
  Description of Artificial Sequence: Synthetic polypeptide
DIQMTQSPSSLSASVGDRVTITCRASQTMSNFLNWYQKKPGEAPKLLISAASRLQSGVPSRFSGSGSGRDFTLTISSLQREDFATYYCQQSYGTPTTFGQGTKVEIK

SEQ ID NO: 3046 - protein, 9 aa, Artificial Sequence
  Description of Artificial Sequence: Synthetic peptide
QQSYGTPTT

SEQ ID NO: 3047 - DNA, 349 bp, Artificial Sequence
  Description of Artificial Sequence: Synthetic polynucleotide
  modified_base (345)..(345): a, c, t, g, unknown or other
caggtgcagctggtgcagtctggggctgagatgaagaagcctgggtcctcggtgaaggtctcctgcaaggcttctggaggctccttcagcacctttcctatcaactgggtgcgacaggcccctggacaaggacttgaggtgatgggaggagtcatccctgtctttcgtacaccaaactacgcagagaagttccagggcagagtcacaattaccgcggacgaatccacgagcacagtctacttggagttgagcagcctgacatctgaggacacggccatatattactgtgcgagagataactggggttttgactactggggccagggaaccctgatcaccgtctcntcag

SEQ ID NO: 3048 - protein, 116 aa, Artificial Sequence
  Description of Artificial Sequence: Synthetic polypeptide
QVQLVQSGAEMKKPGSSVKVSCKASGGSFSTFPINWVRQAPGQGLEVMGGVIPVFRTPNYAEKFQGRVTITADESTSTVYLELSSLTSEDTAIYYCARDNWGFDYWGQGTLITVSS

SEQ ID NO: 3049 - protein, 9 aa, Artificial Sequence
  Description of Artificial Sequence: Synthetic peptide
ARDNWGFDY

SEQ ID NO: 3050 - DNA, 325 bp, Artificial Sequence
  Description of Artificial Sequence: Synthetic polynucleotide
gaaattgtgttgacgcagtctccaggcaccctgtctttgtctccaggggaaagagccaccctctcctgcagggccagtcagactgttaacagcgactacttcgcctggtaccagcagaaacctggccaggctcccagtctcctcatctatggtacatccacaagggccaccggcatcccagacaggttcagtggcagtgggtctgggacagacttcactctcaccatcagcagactggagcctgaagattttgcagtgtatttctgtcagcagtatggtaggtcgccgtacacttttggcaaggggaccaagctggagatcaaac

SEQ ID NO: 3051 - protein, 108 aa, Artificial Sequence
  Description of Artificial Sequence: Synthetic polypeptide
EIVLTQSPGTLSLSPGERATLSCRASQTVNSDYFAWYQQKPGQAPSLLIYGTSTRATGIPDRFSGSGSGTDFTLTISRLEPEDFAVYFCQQYGRSPYTFGKGTKLEIK

SEQ ID NO: 3052 - protein, 9 aa, Artificial Sequence
  Description of Artificial Sequence: Synthetic peptide
QQYGRSPYT

SEQ ID NO: 3053 - DNA, 370 bp, Artificial Sequence
  Description of Artificial Sequence: Synthetic polynucleotide
caggtgcagctggtggagtctgggggaggcgtggtccagcctgggaagtccctaagactctcctgtgcagcctctggattcaccatcaatacctatgctatgcactggatccgccagattccaggcaaggggctggagtgggtggcagttatctcaaaaggtgggggcagccaatactccgcagactccgtgaagggccgattcaccatctccagagacaattccaagaacacagtgtttctgcacatggacaccctgagagctgaggacacggctgtatattactgtgtgagagatcagccgtattacgatttttggagtggtcattttgactactggggccagggaaccccggtcaccgtctcctcag

SEQ ID NO: 3054 - protein, 123 aa, Artificial Sequence
  Description of Artificial Sequence: Synthetic polypeptide
QVQLVESGGGVVQPGKSLRLSCAASGFTINTYAMHWIRQIPGKGLEWVAVISKGGGSQYSADSVKGRFTISRDNSKNTVFLHMDTLRAEDTAVYYCVRDQPYYDFWSGHFDYWGQGTPVTVSS

SEQ ID NO: 3055 - protein, 16 aa, Artificial Sequence
  Description of Artificial Sequence: Synthetic peptide
VRDQPYYDFWSGHFDY

SEQ ID NO: 3056 - DNA, 322 bp, Artificial Sequence
  Description of Artificial Sequence: Synthetic polynucleotide
gacatccagatgacccagtctccatcctccctgtctgcatctgtaggagacagagtcaccatcccttgccgggcaagtcagagcattagcacctatttaaattggtatcagcagagaccagggaaaccccctaagctcctgatctatgctgcatccagtttgcaaagtggggtcccatcacggttcagtggcagtggatctgggacagatttcactctcaccatcagcagtctgcaacctgaagattttgcaacttactactgtcaacagagttccggtattccgtggacgttcggccaggggaccacggtggaagtcaaac

SEQ ID NO: 3057 - protein, 107 aa, Artificial Sequence
  Description of Artificial Sequence: Synthetic polypeptide
DIQMTQSPSSLSASVGDRVTIPCRASQSISTYLNWYQQRPGKPPKLLIYAASSLQSGVPSRFSGSGSGTDFTLTISSLQPEDFATYYCQQSSGIPWTFGQGTTVEVK

SEQ ID NO: 3058 - protein, 9 aa, Artificial Sequence
  Description of Artificial Sequence: Synthetic peptide
QQSSGIPWT

SEQ ID NO: 3059 - DNA, 364 bp, Artificial Sequence
  Description of Artificial Sequence: Synthetic polynucleotide
caggtgcagctggtgcagtctgggactgaggtgaagaagcctggggcctcagtgaaggtttcctgcaagacctctggatacatcttcaccacgcactatttgcactgggtgcgacaggcccctggacaaggccttgagtggatgggactcatcaaccctactggtggtaacacaaacaaagctcagaagttccagggcagactcaccatgaccagggacacgtccacgagtacattctacatggagttgagcagcctgagatctgaagacacggccgtttatttctgtgctagggggagatgggacctgggagagagttctcttgatgtctggggccaagggacactggtcaccgtctcttcag

SEQ ID NO: 3060 - protein, 121 aa, Artificial Sequence
  Description of Artificial Sequence: Synthetic polypeptide
QVQLVQSGTEVKKPGASVKVSCKTSGYIFTTHYLHWVRQAPGQGLEWMGLINPTGGNTNKAQKFQGRLTMTRDTSTSTFYMELSSLRSEDTAVYFCARGRWDLGESSLDVWGQGTLVTVSS

SEQ ID NO: 3061 - protein, 14 aa, Artificial Sequence
  Description of Artificial Sequence: Synthetic peptide
ARGRWDLGESSLDV

SEQ ID NO: 3062 - DNA, 322 bp, Artificial Sequence
  Description of Artificial Sequence: Synthetic polynucleotide
gacatccagatgacccagtctccatcctccctgtctgcatctgtaggagacagaatcatcatcacttgccaggcgagtcaggacattaggagacatttaaattggtatcagcaaaaaccagggaaagcccctaacctcctgatctacgatgcatccaatttggaaacaggggtcccgtcaaggttcactggaagtggatctggcacagattttactttcaccatcagcaacctgcagcctgaagatcttgcaacatatttctgtcaacagtatgataatgtcccgctcactttcggcggagggaccaaggtggatctcaaac

SEQ ID NO: 3063 - protein, 107 aa, Artificial Sequence
  Description of Artificial Sequence: Synthetic polypeptide
DIQMTQSPSSLSASVGDRIIITCQASQDIRRHLNWYQQKPGKAPNLLIYDASNLETGVPSRFTGSGSGTDFTFTISNLQPEDLATYFCQQYDNVPLTFGGGTKVDLK

SEQ ID NO: 3064 - protein, 9 aa, Artificial Sequence
  Description of Artificial Sequence: Synthetic peptide
QQYDNVPLT

SEQ ID NO: 3065 - DNA, 369 bp, Artificial Sequence
  Description of Artificial Sequence: Synthetic polynucleotide
caggtgcagctggtggagtctgggggaggcgtggtccagcctgggaggtccctgagactctcctgtgcagcctctggagtcaccctcagtaggcatgctatgcactgggtccgccaggctccaggcaagggactagagtgggtggcagttatatcatatgatggaagtaataagttatacgcagagtccgtgaagggccgattcaccatctccagagacatttccaagaacacgctggatctgcaaatgaacagcctgagaggtgaggacacggctgtttattactgtgcgagagatggagacacctatggttatgggttctacgctatggacgtctggggcccagggaccacggtcaccgtctcctca

SEQ ID NO: 3066 - protein, 123 aa, Artificial Sequence
  Description of Artificial Sequence: Synthetic polypeptide
QVQLVESGGGVVQPGRSLRLSCAASGVTLSRHAMHWVRQAPGKGLEWVAVISYDGSNKLYAESVKGRFTISRDISKNTLDLQMNSLRGEDTAVYYCARDGDTYGYGFYAMDVWGPGTTVTVSS

SEQ ID NO: 3067 - protein, 16 aa, Artificial Sequence
  Description of Artificial Sequence: Synthetic peptide
ARDGDTYGYGFYAMDV

SEQ ID NO: 3068 - DNA, 322 bp, Artificial Sequence
  Description of Artificial Sequence: Synthetic polynucleotide
gaaattgtgttgacacagtctccagccaccctgtctttgtctccaggggaaagagccaccctctcctgcagggccagtcagagtattagcacctacttagcctggtaccagcagaaacctggccaggctcccaggctcctcatctatgatgcatccgacagggccactggcgtcccagccaggttcagtggcagtgggtctgggacagacttcactctcaccatcaccagcctaaagcctgaagattttgcagtttattactgtcagcagcgtagcagctggcctcttactttcggccctgggaccaaagtggatatcaaac

SEQ ID NO: 3069 - protein, 107 aa, Artificial Sequence
  Description of Artificial Sequence: Synthetic polypeptide
EIVLTQSPATLSLSPGERATLSCRASQSISTYLAWYQQKPGQAPRLLIYDASDRATGVPARFSGSGSGTDFTLTITSLKPEDFAVYYCQQRSSWPLTFGPGTKVDIK

SEQ ID NO: 3070 - protein, 9 aa, Artificial Sequence
  Description of Artificial Sequence: Synthetic peptide
QQRSSWPLT

SEQ ID NO: 3071 - DNA, 375 bp, Artificial Sequence
  Description of Artificial Sequence: Synthetic polynucleotide
gaggtgcagctgttggagtctgggggaggcttggtccagccgggggggtccctgagactctcctgtgcaggctctgaattcagcttttatgaatatgtcatgatttgggtccgccaggctccagggaaggggctggagtgggtctctagtatcagtagtagtggtcgtagcacaaactacgcagactccgtgaagggccgcttcaccatctccagagacaacacgaagaacacgctgtttctgcaaatgaagagcctgagagccgaggacacggccctatattactgtgccagaggagaaaacgattattggagtggttctttttactacggtattgacgtctggggccaaggggccacggtcaccgtctcctca

SEQ ID NO: 3072 - protein, 125 aa, Artificial Sequence
  Description of Artificial Sequence: Synthetic polypeptide
EVQLLESGGGLVQPGGSLRLSCAGSEFSFYEYVMIWVRQAPGKGLEWVSSISSSGRSTNYADSVKGRFTISRDNTKNTLFLQMKSLRAEDTALYYCARGENDYWSGSFYYGIDVWGQGATVTVSS

SEQ ID NO: 3073 - protein, 18 aa, Artificial Sequence
  Description of Artificial Sequence: Synthetic peptide
ARGENDYWSGSFYYGIDV

SEQ ID NO: 3074 - DNA, 337 bp, Artificial Sequence
  Description of Artificial Sequence: Synthetic polynucleotide
gatattgtgatgactcagtctccactctccctgcccgtcacccctggagagccggcctccatctcctgcaggtctagtcagagcctcctgcatactaatggatacaactacttggattggtacctgcagaagccagggcagtctccacagctcctgatctatatgggttctaatcgggcctccggggtccctgacaggttcactggcagtggatcaggcacagattttacactgaaaatcagcagagtggaggctgacgatgttggggtttattactgcatgcaagctctacaaacccggtacacttttggccaggggaccaagctggagatcaaac

SEQ ID NO: 3075 - protein, 112 aa, Artificial Sequence
  Description of Artificial Sequence: Synthetic polypeptide
DIVMTQSPLSLPVTPGEPASISCRSSQSLLHTNGYNYLDWYLQKPGQSPQLLIYMGSNRASGVPDRFTGSGSGTDFTLKISRVEADDVGVYYCMQALQTRYTFGQGTKLEIK

SEQ ID NO: 3076 - protein, 9 aa, Artificial Sequence
  Description of Artificial Sequence: Synthetic peptide
MQALQTRYT

SEQ ID NO: 3077 - DNA, 376 bp, Artificial Sequence
  Description of Artificial Sequence: Synthetic polynucleotide
caggtgcagctggtggagtctgggggaggcgtggtccagcctgggaggtccctgagactctcctgtgcagcctctggattcaccttcagtaggaattctcttcactgggtccgccaggctccaggcaagggcctagagtgggtggcagttatatcatctgaaggaactcataagttctacgcggactccgtcaagggccgattcaccatctccagagacaattcccagaacacactgtatctgcagatggacagcctgagagctgaggacacggctgtatattactgtacgagagatcaggggtattatgctggtatcctcccccccgatccttttgatatctggggccaagggaccatggtcaccgtctcttcag

SEQ ID NO: 3078 - protein, 125 aa, Artificial Sequence
  Description of Artificial Sequence: Synthetic polypeptide
QVQLVESGGGVVQPGRSLRLSCAASGFTFSRNSLHWVRQAPGKGLEWVAVISSEGTHKFYADSVKGRFTISRDNSQNTLYLQMDSLRAEDTAVYYCTRDQGYYAGILPPDPFDIWGQGTMVTVSS

SEQ ID NO: 3079 - protein, 18 aa, Artificial Sequence
  Description of Artificial Sequence: Synthetic peptide
TRDQGYYAGILPPDPFDI

SEQ ID NO: 3080 - DNA, 322 bp, Artificial Sequence
  Description of Artificial Sequence: Synthetic polynucleotide
gaaattgtgttgacacagtctccagccaccctgtctttgtctccaggggaaagagccaccctctcctgcagggccagtcagagtattagcacgtacttagcctggtaccaacagacacctggccaggctcccaggctcctcatctatgatgcttccaacagggccactggcataccagacaggttcagtggcagtgggtctgggacagacttcactctcaccatcagcagcctagagcctgaagattttgcagtttattactgtcagcagcgtagcaactggcctgtcacttttggccaggggaccaagttggagatcaaac

SEQ ID NO: 3081 - protein, 107 aa, Artificial Sequence
  Description of Artificial Sequence: Synthetic polypeptide
EIVLTQSPATLSLSPGERATLSCRASQSISTYLAWYQQTPGQAPRLLIYDASNRATGIPDRFSGSGSGTDFTLTISSLEPEDFAVYYCQQRSNWPVTFGQGTKLEIK

SEQ ID NO: 3082 - protein, 9 aa, Artificial Sequence
  Description of Artificial Sequence: Synthetic peptide
QQRSNWPVT

SEQ ID NO: 3083 - DNA, 352 bp, Artificial Sequence
  Description of Artificial Sequence: Synthetic polynucleotide
caggtccagctggtgcagtctgggactgaggtgaggaagcctgggtcgtcggtgaaggtctcctgcaaggcttttggatacaccttcagcaactatgctatcaactgggtgcgacaggcccctggacaagggcttgagtggatgggaatgatcatccctgtctttggaacaccaaattacgcacggaagttccagggcagagtcattattaccgcggacgaatccacgagcacagcctacttggacctgaccagcctgagatctgatgacacggccatgtattactgtgcgagagactctgctatcctatttgactactggggccagggaacccaggtcaccgtctcttcag

SEQ ID NO: 3084 - protein, 117 aa, Artificial Sequence
  Description of Artificial Sequence: Synthetic polypeptide
QVQLVQSGTEVRKPGSSVKVSCKAFGYTFSNYAINWVRQAPGQGLEWMGMIIPVFGTPNYARKFQGRVIITADESTSTAYLDLTSLRSDDTAMYYCARDSAILFDYWGQGTQVTVSS

SEQ ID NO: 3085 - protein, 10 aa, Artificial Sequence
  Description of Artificial Sequence: Synthetic peptide
ARDSAILFDY

SEQ ID NO: 3086 - DNA, 337 bp, Artificial Sequence
  Description of Artificial Sequence: Synthetic polynucleotide
gatattgtgatgactcagtctccactctccctgcccgtcacccctggagagccggcctccatctcctgcaggtctagtcagagcctcctgcatagaaatggagactactatttggattggtacctgcagaagccagggcagtctccccagctcctgatctatttggtttctaatcgggcctccggggtccctgacaggttcactggcagtgggtcaggcacagactttacactgaaaatcagtagagtggaggctgaggatgttggggtttattactgcatgcaaggtctacaaactcctaggacgttcggccaagggaccaaggtggaaatcaaac

SEQ ID NO: 3087 - protein, 112 aa, Artificial Sequence
  Description of Artificial Sequence: Synthetic polypeptide
DIVMTQSPLSLPVTPGEPASISCRSSQSLLHRNGDYYLDWYLQKPGQSPQLLIYLVSNRASGVPDRFTGSGSGTDFTLKISRVEAEDVGVYYCMQGLQTPRTFGQGTKVEIK

SEQ ID NO: 3088 - protein, 9 aa, Artificial Sequence
  Description of Artificial Sequence: Synthetic peptide
MQGLQTPRT

SEQ ID NO: 3089 - DNA, 368 bp, Artificial Sequence
  Description of Artificial Sequence: Synthetic polynucleotide
gaggtgcagctggtggagtctgggggaggcttggtacagccgggggggtccctgagactctcctgtgtagcctctggattcaccttcaatagtcatagcatgaattgggtccgccaggctccagggaaggggctggagtgggtctcatacattagtactggtagtacttccatatactacgcagagtctgtggagggccgattcaccatctccagagacgatgccaagaactctctcggtctccaaatgaacagcctgagagacgaggacacggctgtgtattactgtgcgaaagagacttgtcgtggtggtaactgctactccttctttgactcctggggccagggaaccctggtcaccgtctcctc

SEQ ID NO: 3090 - protein, 122 aa, Artificial Sequence
  Description of Artificial Sequence: Synthetic polypeptide
EVQLVESGGGLVQPGGSLRLSCVASGFTFNSHSMNWVRQAPGKGLEWVSYISTGSTSIYYAESVEGRFTISRDDAKNSLGLQMNSLRDEDTAVYYCAKETCRGGNCYSFFDSWGQGTLVTVS

SEQ ID NO: 3091 - protein, 16 aa, Artificial Sequence
  Description of Artificial Sequence: Synthetic peptide
AKETCRGGNCYSFFDS

SEQ ID NO: 3092 - DNA, 325 bp, Artificial Sequence
  Description of Artificial Sequence: Synthetic polynucleotide
gacatccagatgacccagtctccttccaccctgtctgcatctataggagacagagtcaccatcacttgccgggccagtcagagtattagtaggtggttggcctggtatcagcagaaaccagggaaagcccctaaactcctgatctataaggcgtctactttagaaagtggggtcccatcaaggttcagcggcagtggatctgggacagaattcactctcaccatcagcagcctgcagcctgatgatcttggaacttattactgccaacaatataatactttttcaaggctcactttcggcggagggaccaaggtggacatcaaac

SEQ ID NO: 3093 - protein, 108 aa, Artificial Sequence
  Description of Artificial Sequence: Synthetic polypeptide
DIQMTQSPSTLSASIGDRVTITCRASQSISRWLAWYQQKPGKAPKLLIYKASTLESGVPSRFSGSGSGTEFTLTISSLQPDDLGTYYCQQYNTFSRLTFGGGTKVDIK

SEQ ID NO: 3094 - protein, 10 aa, Artificial Sequence
  Description of Artificial Sequence: Synthetic peptide
QQYNTFSRLT

SEQ ID NO: 3095 - DNA, 358 bp, Artificial Sequence
  Description of Artificial Sequence: Synthetic polynucleotide
caggtgcagctggtgcagtctggggctgaggtgaagaagcctgggtccgcggtgagggtctcctgcaaggcttcaggaggcaatttcaacaattttgctatcaactgggtgcgacaggcccctggacaagggcttgagtggatgggagggatcatccctgtctttgctaccgcaaactacgcacagaagttccagggcagagtcacgattaccgcggacaaatcgacgaacacagcctacatggagttgagcagcctgacatttgacgacacggccgtctactattgtgcgagagatggggggggtatagcagccgaagactactggggccagggaaccctggtcaccgtctcctcag

SEQ ID NO: 3096 - protein, 119 aa, Artificial Sequence
  Description of Artificial Sequence: Synthetic polypeptide
QVQLVQSGAEVKKPGSAVRVSCKASGGNFNNFAINWVRQAPGQGLEWMGGIIPVFATANYAQKFQGRVTITADKSTNTAYMELSSLTFDDTAVYYCARDGGGIAAEDYWGQGTLVTVSS

SEQ ID NO: 3097 - protein, 12 aa, Artificial Sequence
  Description of Artificial Sequence: Synthetic peptide
ARDGGGIAAEDY

SEQ ID NO: 3098 - DNA, 322 bp, Artificial Sequence
  Description of Artificial Sequence: Synthetic polynucleotide
gacatccagatgacccagtctccatcctccctgtctgcttctgtcggagacagagtcaccatcacttgccgggcaagtcagagcattaacacctatttaaattggtatcagcagaaaccagggaaagcccctaaactcctgatctttgaaacatccaatttgcaaactggggtcccatcaaggttcagtggcagtggatctgggacagatttcactctcaccatcagcagtctgcaacctgaagattttgcaacttactactgtcaacagagttatagaacccctcggacttttggccaggggaccaagctggatatcaaac

SEQ ID NO: 3099 - protein, 107 aa, Artificial Sequence
  Description of Artificial Sequence: Synthetic polypeptide
DIQMTQSPSSLSASVGDRVTITCRASQSINTYLNWYQQKPGKAPKLLIFETSNLQTGVPSRFSGSGSGTDFTLTISSLQPEDFATYYCQQSYRTPRTFGQGTKLDIK

SEQ ID NO: 3100 - protein, 9 aa, Artificial Sequence
  Description of Artificial Sequence: Synthetic peptide
QQSYRTPRT

SEQ ID NO: 3101 - DNA, 390 bp, Artificial Sequence
  Description of Artificial Sequence: Synthetic polynucleotide
caggtgcagctggtggagtctgggggaggcttggtcaagcctggagggtccctgagactctcctgtgcagcctctgggttcatcttcaatgactactacgtgagctggatccgccaggctccagggaaggggctggagtggatttcatacactcttggtggcagtgccatcttctatgcagagtctgtgaagggccgattcaccatctccagggacaacgccaagaacgcagtgtatctgcacatgaacagcctgcgagacgcggacacggccctttatttctgtgcgagaatacatcaaagagatgccaagactcttagcggctttgccccctactactactactacatggatgtctggggcaaagggaccacggtcaccgtctcctca

SEQ ID NO: 3102 - protein, 130 aa, Artificial Sequence
  Description of Artificial Sequence: Synthetic polypeptide
QVQLVESGGGLVKPGGSLRLSCAASGFIFNDYYVSWIRQAPGKGLEWISYTLGGSAIFYAESVKGRFTISRDNAKNAVYLHMNSLRDADTALYFCARIHQRDAKTLSGFAPYYYYYMDVWGKGTTVTVSS

SEQ ID NO: 3103 - protein, 24 aa, Artificial Sequence
  Description of Artificial Sequence: Synthetic peptide
ARIHQRDAKTLSGFAPYYYYYMDV

SEQ ID NO: 3104 - DNA, 325 bp, Artificial Sequence
  Description of Artificial Sequence: Synthetic polynucleotide
gacatccagatgacccagtctccatcctccctgtctgcatctgtaggagacagagtcaccatctcttgccgggcaagtcaggacattagcaactatttaaattggtatcaacagaaaccagggacagcccctaaactcctgatctatgctgcatccactttgcagagtggggtcccgtcaaggttcagtggcagtgggtctgggacagatttcactctcaccatcagcagtctgcaacctgaagattttgcaacttactactgtcaacagagttacagtacccctgcattcactttcggccctgggaccaaagtggatatcaaac

SEQ ID NO: 3105 - protein, 108 aa, Artificial Sequence
  Description of Artificial Sequence: Synthetic polypeptide
DIQMTQSPSSLSASVGDRVTISCRASQDISNYLNWYQQKPGTAPKLLIYAASTLQSGVPSRFSGSGSGTDFTLTISSLQPEDFATYYCQQSYSTPAFTFGPGTKVDIK

SEQ ID NO: 3106 - protein, 10 aa, Artificial Sequence
  Description of Artificial Sequence: Synthetic peptide
QQSYSTPAFT

SEQ ID NO: 3107 - DNA, 364 bp, Artificial Sequence
  Description of Artificial Sequence: Synthetic polynucleotide
caggtgcagctggtggagtctgggggaggcgtggtccagcctgggaggtccctgagactctcctgtgcagcctctggattcaccttcagcaactatgctatgcactgggtccgccaggctccaggcaaggggctagagtgggtggcagttacttcaaatgatgaaactaataaatcttacggagactccgtgaagggccgattcaccatctccagagacaattccaagaacacactgtatctgcagatgaacagcctgagacctgacgacacggctatgtattattgtgcgaaagatagcagtgcctgggtggacaattactttgagtattggggccagggcgccctggtcgccgtctcctcag

SEQ ID NO: 3108 - protein, 121 aa, Artificial Sequence
  Description of Artificial Sequence: Synthetic polypeptide
QVQLVESGGGVVQPGRSLRLSCAASGFTFSNYAMHWVRQAPGKGLEWVAVTSNDETNKSYGDSVKGRFTISRDNSKNTLYLQMNSLRPDDTAMYYCAKDSSAWVDNYFEYWGQGALVAVSS

SEQ ID NO: 3109 - protein, 14 aa, Artificial Sequence
  Description of Artificial Sequence: Synthetic peptide
AKDSSAWVDNYFEY

SEQ ID NO: 3110 - DNA, 322 bp, Artificial Sequence
  Description of Artificial Sequence: Synthetic polynucleotide
gaaatagtgatgacgcagtctccagccaccctgtctgtgtctccaggggacagagccaccctctcctgcagggccagtcggagtcttaccaacaactttgcctggtaccagcagaaacctggccaggttcccaggctcctcatctatggtgcatccaccagggccactggtgtccccgccaggttcagtggcagtgggtctgggacagagttcacactcaccatcagcagtctgcagtctgaagattttgcagtttattactgtcagcagtatgattactggccgctcactttcggcggagggaccaaggtggagatcaaac

SEQ ID NO: 3111 - protein, 107 aa, Artificial Sequence
  Description of Artificial Sequence: Synthetic polypeptide
EIVMTQSPATLSVSPGDRATLSCRASRSLTNNFAWYQQKPGQVPRLLIYGASTRATGVPARFSGSGSGTEFTLTISSLQSEDFAVYYCQQYDYWPLTFGGGTKVEIK

SEQ ID NO: 3112 - protein, 9 aa, Artificial Sequence
  Description of Artificial Sequence: Synthetic peptide
QQYDYWPLT

SEQ ID NO: 3113 - DNA, 372 bp, Artificial Sequence
  Description of Artificial Sequence: Synthetic polynucleotide
caggtgcagctggtggagtctgggggaggcgtagtccagcctgggaggtccctgagactctcctgtgcagcgtctggattcaccttcagtaattatggcatgcactgggtccgccaggctccaggcaaggggctggagtgggtggcatttatttggtatgatgcaagtaataaatattattcagactccgtgaagggccgattcaacatctccagagacaattccaagaacactctgtatctgcaaatgcacagcctgagagtcgaggacacggctgtgtattactgtgcgagagatccttggcagcggggggccaatgtggcgtattacatggacgtctggggcaaagggaccacggtcaccgtctcctca

SEQ ID NO: 3114 - protein, 124 aa, Artificial Sequence
  Description of Artificial Sequence: Synthetic polypeptide
QVQLVESGGGVVQPGRSLRLSCAASGFTFSNYGMHWVRQAPGKGLEWVAFIWYDASNKYYSDSVKGRFNISRDNSKNTLYLQMHSLRVEDTAVYYCARDPWQRGANVAYYMDVWGKGTTVTVSS

SEQ ID NO: 3115 - protein, 17 aa, Artificial Sequence
  Description of Artificial Sequence: Synthetic peptide
ARDPWQRGANVAYYMDV

SEQ ID NO: 3116 - DNA, 325 bp, Artificial Sequence
  Description of Artificial Sequence: Synthetic polynucleotide
gaaattgtgttgacacagtctccagccaccctgtctttgtctccaggggaaagagtcaccctctcctgcagggccagtcagagtgttggcaactacttagcctggtaccaacagaaacctggccaggctcccaggctcctcatctatgatgcgtccaacagggccactggcatcccagccaggttcagtggcagtgggtctgggacagacttcactctcaccatcagcagcctagagcctgaagattttgcagtttattactgtcagcagcgtagcaactggcctccgctcactttcggcggagggaccaaggtggagatcaaac

SEQ ID NO: 3117 - protein, 108 aa, Artificial Sequence
  Description of Artificial Sequence: Synthetic polypeptide
EIVLTQSPATLSLSPGERVTLSCRASQSVGNYLAWYQQKPGQAPRLLIYDASNRATGIPARFSGSGSGTDFTLTISSLEPEDFAVYYCQQRSNWPPLTFGGGTKVEIK

SEQ ID NO: 3118 - protein, 10 aa, Artificial Sequence
  Description of Artificial Sequence: Synthetic peptide
QQRSNWPPLT

SEQ ID NO: 3119 - DNA, 349 bp, Artificial Sequence
  Description of Artificial Sequence: Synthetic polynucleotide
caggtgcagctggtgcagtctggggctgaagtgaagaagcctgggtcctcggtgaaggtctcctgcaaggcctctggaggcaccttcagcaactatgctatcaactgggtgcgacaggcccctggacaagggcttgagtggatgggagacatcatccctgtctttgggacaccaaactacgcaccgaatttccagggccgagtcatcattaccgcggacgaatccacgagcacagcctacatggagctgagcagcctgagatctgacgacacggccgtatattactgtgcgagaggcgtttgggggtgggactactggggccagggaaccctggtcaccgtctcctcag

SEQ ID NO: 3120 - protein, 116 aa, Artificial Sequence
  Description of Artificial Sequence: Synthetic polypeptide
QVQLVQSGAEVKKPGSSVKVSCKASGGTFSNYAINWVRQAPGQGLEWMGDIIPVFGTPNYAPNFQGRVIITADESTSTAYMELSSLRSDDTAVYYCARGVWGWDYWGQGTLVTVSS

SEQ ID NO: 3121 - protein, 9 aa, Artificial Sequence
  Description of Artificial Sequence: Synthetic peptide
ARGVWGWDY

SEQ ID NO: 3122 - DNA, 323 bp, Artificial Sequence
  Description of Artificial Sequence: Synthetic polynucleotide
gaaattgtgttgacgcagtctccaggcaccctgtctttgtctccgggggaaagagccaccctctcctgcagggccactcagagtgttagcagcgactacttagcctggtaccagcagaaacctggccaggctcccaggctcctcatctatggtgcatccgccagggccactggcatcccagacaggttcagtggcagtgtttctgggacagacttcactctcaccgtcagcagactggagcctgaagattttgcagtgtatttctgtcagcagtatggtagctcacctttcacttttggccaggggaccaagttggagatcaa

SEQ ID NO: 3123 - protein, 107 aa, Artificial Sequence
  Description of Artificial Sequence: Synthetic polypeptide
EIVLTQSPGTLSLSPGERATLSCRATQSVSSDYLAWYQQKPGQAPRLLIYGASARATGIPDRFSGSVSGTDFTLTVSRLEPEDFAVYFCQQYGSSPFTFGQGTKLEI

SEQ ID NO: 3124 - protein, 9 aa, Artificial Sequence
  Description of Artificial Sequence: Synthetic peptide
QQYGSSPFT

SEQ ID NO: 3125 - DNA, 364 bp, Artificial Sequence
  Description of Artificial Sequence: Synthetic polynucleotide
caggtgcagctggtgcagtctggggctgaggtgaagaagcctgggtcctcggtgaaggtctcctgcaaggcttctgcttctggagactccttcagcaactacgctctcacctggctgcgacaggcccctggacaagggcttgagtggatggggggaatcatccctttctttggcactccaaactacgcacggaagttccagggcagagtcaccattaccgcggacaaattcacgaccacagcctacatggagctgagcagcctgaaatctgaagacacggccctctattactgtgcgagagagtcgggagcagttgcagtttttgacgactggggccagggaaccctggtcaccgtctcctcag

SEQ ID NO: 3126 - protein, 121 aa, Artificial Sequence
  Description of Artificial Sequence: Synthetic polypeptide
QVQLVQSGAEVKKPGSSVKVSCKASASGDSFSNYALTWLRQAPGQGLEWMGGIIPFFGTPNYARKFQGRVTITADKFTTTAYMELSSLKSEDTALYYCARESGAVAVFDDWGQGTLVTVSS

SEQ ID NO: 3127 - protein, 12 aa, Artificial Sequence
  Description of Artificial Sequence: Synthetic peptide
ARESGAVAVFDD

SEQ ID NO: 3128 - DNA, 322 bp, Artificial Sequence
  Description of Artificial Sequence: Synthetic polynucleotide
gacatccagttgacccagtctccatccttcctgtctgcatctgtaggagacagagtcaccatcacttgccgggccagtcagggcattagcagtgatttagcctggtatcagcaaaaaccagggaaagcccctaaactcctgatctatggtgcagccactttgcaaagtggggtcccgtcaaggtttagcggcagtggatctgggacagaattcactctcagaatcggcggcctgcagcctgaagatttcgcaacttattactgtcaacagcacaataattacccgctcactttcggcggagggaccaagctggagatcaaac

SEQ ID NO: 3129 - protein, 107 aa, Artificial Sequence
  Description of Artificial Sequence: Synthetic polypeptide
DIQLTQSPSFLSASVGDRVTITCRASQGISSDLAWYQQKPGKAPKLLIYGAATLQSGVPSRFSGSGSGTEFTLRIGGLQPEDFATYYCQQHNNYPLTFGGGTKLEIK

SEQ ID NO: 3130 - protein, 9 aa, Artificial Sequence
  Description of Artificial Sequence: Synthetic peptide
QQHNNYPLT

SEQ ID NO: 3131 - DNA, 360 bp, Artificial Sequence
  Description of Artificial Sequence: Synthetic polynucleotide
caggtgcagctggtgcagtctggggctgaggtaaagaagcctgggtcctcggtgaaggtctcctgcaagggatctggaggcaccttcagcaactattctatcagttgggtgcgacaggcccctggacaagggcttgagtgggtgggagggatcatccctatgtttgatacagcaaactacgcacagaggttccggggcagagtcacgcttaccgcggacgaatccacgaccacagcctacatggagctgagcagcctgagatctgaggacacggccgtttattattgtgcgagagattgggtagtagcagcccacggtatggacgtctggggccaagggaccacggtcagcgtctcctca

SEQ ID NO: 3132 - protein, 120 aa, Artificial Sequence
  Description of Artificial Sequence: Synthetic polypeptide
QVQLVQSGAEVKKPGSSVKVSCKGSGGTFSNYSISWVRQAPGQGLEWVGGIIPMFDTANYAQRFRGRVTLTADESTTTAYMELSSLRSEDTAVYYCARDWVVAAHGMDVWGQGTTVSVSS

SEQ ID NO: 3133 - protein, 13 aa, Artificial Sequence
  Description of Artificial Sequence: Synthetic peptide
ARDWVVAAHGMDV

SEQ ID NO: 3134 - DNA, 323 bp, Artificial Sequence
  Description of Artificial Sequence: Synthetic polynucleotide
gaaattgtgttgacacagtctccagccaccctgtctttgtctccgggggagagagccaccctctcctgcagggccagtcagagtgttagcacctacgtaacctggtaccaacacaaacctggccaggctcccaggctcctcatctatgatgcatccaagagggccactggcatcccaggcaggttcagtggcagtgggtctggaacagacttcactctcaccatcagcaccctagaacctgaagattttgcagtttattactgtcagcagcgtagcaactggcctctttggacgttcggccaagggaccaaggtggagatcaa

SEQ ID NO: 3135 - protein, 107 aa, Artificial Sequence
  Description of Artificial Sequence: Synthetic polypeptide
EIVLTQSPATLSLSPGERATLSCRASQSVSTYVTWYQHKPGQAPRLLIYDASKRATGIPGRFSGSGSGTDFTLTISTLEPEDFAVYYCQQRSNWPLWTFGQGTKVEI

SEQ ID NO: 3136 - protein, 10 aa, Artificial Sequence
  Description of Artificial Sequence: Synthetic peptide
QQRSNWPLWT

SEQ ID NO: 3137 - DNA, 390 bp, Artificial Sequence
  Description of Artificial Sequence: Synthetic polynucleotide
caggtgcagctggtggagtctgggggaggcttggtcaagccgggagggtccctgagactctcctgtacagcctctggattcaccttcagtgactaccacctgagctgggtccgccaggctccagggaagggactggaattagtttcatacatttttagtagtgggagtcccatgttctacgcagactcattggagggccgattcaccatctccagggacaacgccaagaactcactgtatcttcagatgaacagcctcagagccgaggacacggccgtctattactgtgcgagagtggggcaccagctggcaaaaggggactcgttcaacccctactactactactacatggacgtctggggcaaagggaccacggtctccgtctcctca

SEQ ID NO: 3138 - protein, 130 aa, Artificial Sequence
  Description of Artificial Sequence: Synthetic polypeptide
QVQLVESGGGLVKPGGSLRLSCTASGFTFSDYHLSWVRQAPGKGLELVSYIFSSGSPMFYADSLEGRFTISRDNAKNSLYLQMNSLRAEDTAVYYCARVGHQLAKGDSFNPYYYYYMDVWGKGTTVSVSS

SEQ ID NO: 3139 - protein, 23 aa, Artificial Sequence
  Description of Artificial Sequence: Synthetic peptide
ARVGHQLAKGDSFNPYYYYYMDV

SEQ ID NO: 3140 - DNA, 325 bp, Artificial Sequence
  Description of Artificial Sequence: Synthetic polynucleotide
gacatccagatgacccagtctccatcctccctgtctgcgtctgttggagacagagtcaccatcacttgccgggcaagtcagagcatcagcagctatttaaattggtatcaaaagaaaccagggaaagcccctaagctcctgatctatgctgcttccactttgcaaagtggggtcccatcaaggttcagtggcagtggatctgggacagatttcactctcaccatcagcagtctgcaacctgaagattttgcaacttactactgtcaacagagttacagcacccctgcgctcactttcggcggagggaccaaggtggaaatcaaac

SEQ ID NO: 3141 - protein, 108 aa, Artificial Sequence
  Description of Artificial Sequence: Synthetic polypeptide
DIQMTQSPSSLSASVGDRVTITCRASQSISSYLNWYQKKPGKAPKLLIYAASTLQSGVPSRFSGSGSGTDFTLTISSLQPEDFATYYCQQSYSTPALTFGGGTKVEIK

SEQ ID NO: 3142 - protein, 10 aa, Artificial Sequence
  Description of Artificial Sequence: Synthetic peptide
QQSYSTPALT

SEQ ID NO: 3143 - DNA, 355 bp, Artificial Sequence
  Description of Artificial Sequence: Synthetic polynucleotide
caggtgcagctggtgcagtctggggctgaggtgaagaagcctgggtcctcggtgaaggtctcctgcaaggcttctggagccaccctcaccaactatgctgtcaggtgggtgcgacaggcccctggacaagggcttgagtggatgggagggatcatccctatctttcgtacgccacactacgcacagaagttccagggcagagtcacgattaccgcggacgaatccacgaacacagcctacttggagctgagcagcctgagatctgaagacacggccatgtattactgtgcgagatcttttgggggtcatgggggcgactactggggccagggaaccctggtcaccgtctcgtcag

SEQ ID NO: 3144 - protein, 118 aa, Artificial Sequence
  Description of Artificial Sequence: Synthetic polypeptide
QVQLVQSGAEVKKPGSSVKVSCKASGATLTNYAVRWVRQAPGQGLEWMGGIIPIFRTPHYAQKFQGRVTITADESTNTAYLELSSLRSEDTAMYYCARSFGGHGGDYWGQGTLVTVSS

SEQ ID NO: 3145 - protein, 11 aa, Artificial Sequence
  Description of Artificial Sequence: Synthetic peptide
ARSFGGHGGDY

SEQ ID NO: 3146 - DNA, 325 bp, Artificial Sequence
  Description of Artificial Sequence: Synthetic polynucleotide
gacatccagatgacccagtctccatcctccctgtctgcatctgtaggagacagagtcaccatcacttgccaggcgagtcaggacattaccaactatttaaattggtatcagctgaaaccagggaaagcccctaaactcctgatcttcgatgcatccaatttggaaacaggggtcccatcaaggttcagtggaagtggatcggggacactttttactttcagcatcagcggcctgcagcctgaagatattgcaacatattactgtcaacattatgataatctccctcgattcactttcggccctgggaccaaagtggatatcaaac

SEQ ID NO: 3147 - protein, 108 aa, Artificial Sequence
  Description of Artificial Sequence: Synthetic polypeptide
DIQMTQSPSSLSASVGDRVTITCQASQDITNYLNWYQLKPGKAPKLLIFDASNLETGVPSRFSGSGSGTLFTFSISGLQPEDIATYYCQHYDNLPRFTFGPGTKVDIK

SEQ ID NO: 3148 - protein, 10 aa, Artificial Sequence
  Description of Artificial Sequence: Synthetic peptide
QHYDNLPRFT

SEQ ID NO: 3149 - DNA, 390 bp, Artificial Sequence
  Description of Artificial Sequence: Synthetic polynucleotide
gaggtgcagctggtggagtctgggggaggcttggtccagcctggggggtccctgagactctcctgtgcagcctctagaatcatctttagtagctattggatgagctgggtccgccaggctccagggaaggggctggagtgggtggccaacataaaccaagatggtagtgcgaaatactatgtggactctgtgaagggccgattcaccatctccagagacaacgccaagaattccctgtttctgcaaatgaacagcctgagagccgaggacacggctgtctattactgtgtgagagatggatcaacagaggccgcaccacaacctgatagaccctactactactactacatggacgtctggggcaaagggaccacggtcaccgtctcctca

SEQ ID NO: 3150 - protein, 130 aa, Artificial Sequence
  Description of Artificial Sequence: Synthetic polypeptide
EVQLVESGGGLVQPGGSLRLSCAASRIIFSSYWMSWVRQAPGKGLEWVANINQDGSAKYYVDSVKGRFTISRDNAKNSLFLQMNSLRAEDTAVYYCVRDGSTEAAPQPDRPYYYYYMDVWGKGTTVTVSS

SEQ ID NO: 3151 - protein, 23 aa, Artificial Sequence
  Description of Artificial Sequence: Synthetic peptide
VRDGSTEAAPQPDRPYYYYYMDV

SEQ ID NO: 3152 - DNA, 319 bp, Artificial Sequence
  Description of Artificial Sequence: Synthetic polynucleotide
gacatccagatgacccagtctccatcctccctgtctgcatctgtaggagacagagtcaccatcacttgccgggcaagtcagagcatttacaactatttaaattggtatcagcagaaaccagggaaagcccctcagctcctgatctatgctgcgtccactttgcaaagtggggtcccatcaaggttcagcggcagtggatctgggacagatttcactctcaccatcagcagtctgcaacctgaagattttgcaacttactactgtcaacagagttacagtaccccttcgctcactttcggcggagggaccaaggtggaga

SEQ ID NO: 3153 - protein, 106 aa, Artificial Sequence
  Description of Artificial Sequence: Synthetic polypeptide
DIQMTQSPSSLSASVGDRVTITCRASQSIYNYLNWYQQKPGKAPQLLIYAASTLQSGVPSRFSGSGSGTDFTLTISSLQPEDFATYYCQQSYSTPSLTFGGGTKVE

SEQ ID NO: 3154 - protein, 10 aa, Artificial Sequence
  Description of Artificial Sequence: Synthetic peptide
QQSYSTPSLT

SEQ ID NO: 3155 - DNA, 364 bp, Artificial Sequence
  Description of Artificial Sequence: Synthetic polynucleotide
caggtgcagctggtgcagtctggggctgaggtgaagaagcctggggcctcagtgaaggtttcctgcaagtcatctggatacgccttcaccacctactatctgcactgggtgcggcaggcccctggacaacgccttgagtggatgggattaatcaaccctagtgctggtactacaacctacgcacagagattccagggtagagtcaccatgaccagggacacgtcctcgagcacagtctacattgacctgagcagcctgaaatctgaggacacggccgtgtatttctgtgctagggggagatgggacctaggagagagtagtcttgatatctggggccaagggacaatggtcaccgtctcttcag

SEQ ID NO: 3156 - protein, 121 aa, Artificial Sequence
  Description of Artificial Sequence: Synthetic polypeptide
QVQLVQSGAEVKKPGASVKVSCKSSGYAFTTYYLHWVRQAPGQRLEWMGLINPSAGTTTYAQRFQGRVTMTRDTSSSTVYIDLSSLKSEDTAVYFCARGRWDLGESSLDIWGQGTMVTVSS

SEQ ID NO: 3157 - protein, 14 aa, Artificial Sequence
  Description of Artificial Sequence: Synthetic peptide
ARGRWDLGESSLDI

SEQ ID NO: 3158 - DNA, 322 bp, Artificial Sequence
  Description of Artificial Sequence: Synthetic polynucleotide
gacatccagatgacccagtctccatcctccctgtctgcatctgtaggagacagagtcaccgtcacttgccaggcgagtcaggacattaggaagcatttaaattggtatcagcagaaaccagggaaagcccctaagctcctgatttacgatgcatccgatttggaggtcggggtcccatcaaggttcagtggacgtggatctgggacagattttactttcacgatcaacagcctgcagcctgaagattttgcaacatatttctgtcaacagtatgataatgtcccgctcactttcggcggagggaccaaggtggagatgaaac

SEQ ID NO: 3159 - protein, 107 aa, Artificial Sequence
  Description of Artificial Sequence: Synthetic polypeptide
DIQMTQSPSSLSASVGDRVTVTCQASQDIRKHLNWYQQKPGKAPKLLIYDASDLEVGVPSRFSGRGSGTDFTFTINSLQPEDFATYFCQQYDNVPLTFGGGTKVEMK

SEQ ID NO: 3160 - protein, 9 aa, Artificial Sequence
  Description of Artificial Sequence: Synthetic peptide
QQYDNVPLT

SEQ ID NO: 3161 - DNA, 361 bp, Artificial Sequence
  Description of Artificial Sequence: Synthetic polynucleotide
caggtgcagctggtggagtctgggggaggcgtggtccagcctgggaggtccctgacaatcgcctgcgcagcgtctgggttccgtggttatgccttccactgggtccgccaggctccaggcaagggactggagtgggtggcagttatctggtatgatggaagtaatcaacactatgcagactccgtgaagggccgattcaccatctccagagacaactccatgaatacgatatatctgcaaatgaacaatgtgagagccgaggacacggctctctatttttgtgcgagagagggaggaagtggctggcccggtgacgctctccacttctggggccaagggacaatggtcaccgtctcttcag

SEQ ID NO: 3162 - protein, 120 aa, Artificial Sequence
  Description of Artificial Sequence: Synthetic polypeptide
QVQLVESGGGVVQPGRSLTIACAASGFRGYAFHWVRQAPGKGLEWVAVIWYDGSNQHYADSVKGRFTISRDNSMNTIYLQMNNVRAEDTALYFCAREGGSGWPGDALHFWGQGTMVTVSS

SEQ ID NO: 3163 - protein, 15 aa, Artificial Sequence
  Description of Artificial Sequence: Synthetic peptide
AREGGSGWPGDALHF

SEQ ID NO: 3164 - DNA, 325 bp, Artificial Sequence
  Description of Artificial Sequence: Synthetic polynucleotide
gaaattgtgttgacgcagtctccaggcaccctgtctttgtctccaggggaaagagccaccctctcctgcagggccagtcagagtattagcagcaactacttagcctggtaccagcagaagcctggccaggctcccaggctcctcgtctacggtgcatccagaagggcctctggcatcccagacaggttcagtggtagtgggtctgggacagacttcactctcaccatcagcagactggcgcctgaagattttgcagtgtattactgtcagcagtatggtaactcaccgtacacttttggccgggggaccaagctggagatcaaac

SEQ ID NO: 3165 - protein, 108 aa, Artificial Sequence
  Description of Artificial Sequence: Synthetic polypeptide
EIVLTQSPGTLSLSPGERATLSCRASQSISSNYLAWYQQKPGQAPRLLVYGASRRASGIPDRFSGSGSGTDFTLTISRLAPEDFAVYYCQQYGNSPYTFGRGTKLEIK

SEQ ID NO: 3166 - protein, 9 aa, Artificial Sequence
  Description of Artificial Sequence: Synthetic peptide
QQYGNSPYT

SEQ ID NO: 3167 - DNA, 355 bp, Artificial Sequence
  Description of Artificial Sequence: Synthetic polynucleotide
caggtccagctggtgcagtctggggctgaggtgaagaagcctgggtcctcggtgaaggtctcctgcaaggcttctggaggcaccctcagcaactatgctgtcagctgggtgcgacaggcccctggacaagggcttgagtggatgggagggatcatccctgcctttcgtacatcaaactacgcacagaagttcctgggcagagtcacgattaccgcggacgaatccacgagcacagcctacatggaactgagcagcctgagatctgaggacacggccgtatattactgtgcgagagcaatggggtctacggggggggactactggggccagggaaccctggtcaccgtctcctcag

SEQ ID NO: 3168 - protein, 118 aa, Artificial Sequence
  Description of Artificial Sequence: Synthetic polypeptide
QVQLVQSGAEVKKPGSSVKVSCKASGGTLSNYAVSWVRQAPGQGLEWMGGIIPAFRTSNYAQKFLGRVTITADESTSTAYMELSSLRSEDTAVYYCARAMGSTGGDYWGQGTLVTVSS

SEQ ID NO: 3169 - protein, 11 aa, Artificial Sequence
  Description of Artificial Sequence: Synthetic peptide
ARAMGSTGGDY

SEQ ID NO: 3170 - DNA, 325 bp, Artificial Sequence
  Description of Artificial Sequence: Synthetic polynucleotide
gacatccagatgacccagtctccatcctccctgtctgcttctgtaggagacagagtcaccatcacttgccaggcgagtcaggacattagcaactatttaaattggtatcagcagaaaccagggaaagcccctaagctcctgatctacgatgcttccaatttggaaacaggggtcccatcaaggttcagtggaagtggatctgggacagattttactttcaccatcagcagcctccagcctgaagatattgcaacatattactgtcaaaactatgatagtctccctcgactcactttcggcggagggaccagggtggagatcaaac

SEQ ID NO: 3171 - protein, 108 aa, Artificial Sequence
  Description of Artificial Sequence: Synthetic polypeptide
DIQMTQSPSSLSASVGDRVTITCQASQDISNYLNWYQQKPGKAPKLLIYDASNLETGVPSRFSGSGSGTDFTFTISSLQPEDIATYYCQNYDSLPRLTFGGGTRVEIK

SEQ ID NO: 3172 - protein, 10 aa, Artificial Sequence
  Description of Artificial Sequence: Synthetic peptide
QNYDSLPRLT

SEQ ID NO: 3173 - DNA, 355 bp, Artificial Sequence
  Description of Artificial Sequence: Synthetic polynucleotide
caggtgcagctggtgcagtctggggctgaggtgaagaagcctgggtcctcggtgaaggtctcctgcaaggcttctggaggcaccttcagcaactatgctatcacctgggtgcgacaggcccctggacaaggccttgagtggatgggagggatcatccctctctttggtacaccaaactacgcacagaagttccagggcagagtcacgattaccgcggacgaatctacgagcacagcctacatggagctgagcagcctgagatctgaggacacggccgtgttttactgtgcgagagatgacggggtgacacctatgagttactggggccagggaaccctggtcaccgtctcctcag

SEQ ID NO: 3174 - protein, 118 aa, Artificial Sequence
  Description of Artificial Sequence: Synthetic polypeptide
QVQLVQSGAEVKKPGSSVKVSCKASGGTFSNYAITWVRQAPGQGLEWMGGIIPLFGTPNYAQKFQGRVTITADESTSTAYMELSSLRSEDTAVFYCARDDGVTPMSYWGQGTLVTVSS

SEQ ID NO: 3175 - protein, 11 aa, Artificial Sequence
  Description of Artificial Sequence: Synthetic peptide
ARDDGVTPMSY

SEQ ID NO: 3176 - DNA, 337 bp, Artificial Sequence
  Description of Artificial Sequence: Synthetic polynucleotide
gatattgtgatgactcagtctccactctccctgcccgtcacccctggagagccggcctccatctcctgcaggtctagtcagagcctcctgcatagtattggatacaactatttaaattggtacctgcagaagccagggcagtctccacagctcctgatctatttgggttctaatcgggcctccggggtccctgacaggttcagtggcagtggatcaggcacagattttacactgaaaatcagcagagtggaggctgaggatgttggggtttattactgcgcgcaagttctacaaactcctcacacttttggccaggggaccaagctggagatcaaac

SEQ ID NO: 3177 - protein, 112 aa, Artificial Sequence
  Description of Artificial Sequence: Synthetic polypeptide
DIVMTQSPLSLPVTPGEPASISCRSSQSLLHSIGYNYLNWYLQKPGQSPQLLIYLGSNRASGVPDRFSGSGSGTDFTLKISRVEAEDVGVYYCAQVLQTPHTFGQGTKLEIK

SEQ ID NO: 3178 - protein, 9 aa, Artificial Sequence
  Description of Artificial Sequence: Synthetic peptide
AQVLQTPHT

SEQ ID NO: 3179 - DNA, 379 bp, Artificial Sequence
  Description of Artificial Sequence: Synthetic polynucleotide
gaggtgcagctgttggagtctgggggaggcttggtacagcgggggggctccctgagactctcctgtgcaggctctggattcggctttagcgactatgccatgagttgggtccgccaggctccagggaaggggctggagtgggtctcaagtattagtggtagtggtggtagctcatactacgcagactctgtgaagggccggttcaccatctccagagacaattccaagaacacactgtatctgcaaatgaacttcctgagagccggggacacggccgtatattactgtgcgcgtgaagacagagactacggtgactacggaaaagagccaggcccttttgactactggggccagggaacccttgtcaccgtctcctcag

SEQ ID NO: 3180 - protein, 126 aa, Artificial Sequence
  Description of Artificial Sequence: Synthetic polypeptide
EVQLLESGGGLVQRGGSLRLSCAGSGFGFSDYAMSWVRQAPGKGLEWVSSISGSGGSSYYADSVKGRFTISRDNSKNTLYLQMNFLRAGDTAVYYCAREDRDYGDYGKEPGPFDYWGQGTLVTVSS

SEQ ID NO: 3181 - protein, 19 aa, Artificial Sequence
  Description of Artificial Sequence: Synthetic peptide
AREDRDYGDYGKEPGPFDY

SEQ ID NO: 3182 - DNA, 322 bp, Artificial Sequence
  Description of Artificial Sequence: Synthetic polynucleotide
gacatccagatgacccagtctccttccaccctgtctgcatctgtgggagacagagtcaccatcacttgccgggccagtcagactattagtacctggttggcctggtatcagcagaaaccagggaaagcccctaagctcctaatctatgaggcgtctagtttacaaagtggggtcccatcaaggttcagcggcagtggatctgggacagaattcactctcaccatcagcagcctgcagcctgaagattttgcaacttattactgccaacagtattatagttatattcggacgttcggccaagggtccaaggtggaaatcaaac

SEQ ID NO: 3183 - protein, 107 aa, Artificial Sequence
  Description of Artificial Sequence: Synthetic polypeptide
DIQMTQSPSTLSASVGDRVTITCRASQTISTWLAWYQQKPGKAPKLLIYEASSLQSGVPSRFSGSGSGTEFTLTISSLQPEDFATYYCQQYYSYIRTFGQGSKVEIK

SEQ ID NO: 3184 - protein, 9 aa, Artificial Sequence
  Description of Artificial Sequence: Synthetic peptide
QQYYSYIRT

SEQ ID NO: 3185 - DNA, 358 bp, Artificial Sequence
  Description of Artificial Sequence: Synthetic polynucleotide
caggtgcagctggtggagtctgggggaggcgtggtccagcctgggaggtccctgagactctcctgcgcagcctctggattcaccttcagtcactatggtatgcactgggtccgccaggctccaggcaaggggctagagtgggtggcacgtatatcctatgatggaagtaataagtactacacagactccgtgaagggccgattcaccatctccagagacaattccaagaacactctgtatctgcaaatgaacagcctgagacctgaggacacggctgtgtattactgtgcgagagatgggggagcagtgactggtctgtcctactggggccagggaaccctggtcaccgtctcctcag

SEQ ID NO: 3186 - protein, 119 aa, Artificial Sequence
  Description of Artificial Sequence: Synthetic polypeptide
QVQLVESGGGVVQPGRSLRLSCAASGFTFSHYGMHWVRQAPGKGLEWVARISYDGSNKYYTDSVKGRFTISRDNSKNTLYLQMNSLRPEDTAVYYCARDGGAVTGLSYWGQGTLVTVSS

SEQ ID NO: 3187 - protein, 12 aa, Artificial Sequence
  Description of Artificial Sequence: Synthetic peptide
ARDGGAVTGLSY

SEQ ID NO: 3188 - DNA, 322 bp, Artificial Sequence
  Description of Artificial Sequence: Synthetic polynucleotide
gccatccagttgacccagtctccatcctccctgtctgcatctgtaggagacagagtcaccatcacttgccgggcaagtcagggcgttagcagtgctttagcctggtatcagcagaaaccaggcaaagctcctaagctcctgatctatgatgcctcctatttggacagtggggtcccatccaggttcagcggccgtggatctgggacagatttcactctcaccatcagcagcctgcagcctgaagattttgcaacttattactgtcaacagtttaatagttacccgtggacgttcggccaagggaccaaggtggaagtcaaac

SEQ ID NO: 3189 - protein, 107 aa, Artificial Sequence
  Description of Artificial Sequence: Synthetic polypeptide
AIQLTQSPSSLSASVGDRVTITCRASQGVSSALAWYQQKPGKAPKLLIYDASYLDSGVPSRFSGRGSGTDFTLTISSLQPEDFATYYCQQFNSYPWTFGQGTKVEVK

SEQ ID NO: 3190 - protein, 9 aa, Artificial Sequence
  Description of Artificial Sequence: Synthetic peptide
QQFNSYPWT

SEQ ID NO: 3191 - DNA, 387 bp, Artificial Sequence
  Description of Artificial Sequence: Synthetic polynucleotide
caggtgcagctggtgcagtctgggactgaggtgaagatgcctgggtcctcggtgaaggtctcctgcaaggctcctagaggcaccttcagcaactatgctatcaactgggtgcggcaggcccctggacaagggctggagtggatgggagggaccatccctgtctttggtacaccaaattacgcacaggagttccagggcagagtcacctttatcgcggacgagtccacgagcacagcctacatggagctgagcggcctgaaatctgaggacacggccgtctattactgtgcgggggggcgggggtacgatttttggagtggctatccggactactactactacggtatggacgtctggggccaggggaccacggtcaccgtctcctca

SEQ ID NO: 3192 - protein, 129 aa, Artificial Sequence
  Description of Artificial Sequence: Synthetic polypeptide
QVQLVQSGTEVKMPGSSVKVSCKAPRGTFSNYAINWVRQAPGQGLEWMGGTIPVFGTPNYAQEFQGRVTFIADESTSTAYMELSGLKSEDTAVYYCAGGRGYDFWSGYPDYYYYGMDVWGQGTTVTVSS

SEQ ID NO: 3193 - protein, 22 aa, Artificial Sequence
  Description of Artificial Sequence: Synthetic peptide
AGGRGYDFWSGYPDYYYYGMDV

SEQ ID NO: 3194 - DNA, 331 bp, Artificial Sequence
  Description of Artificial Sequence: Synthetic polynucleotide
gaaattgtgttgacgcagtctccaggcaccctgtctttgtctccaggggaaagagccaccctctcctgcagggccagtcagagtattagcggcacctacttacactggtaccagcagaaacctggccaggctcccaggctcctcatctatggtgcatccaccagggccactggcatcccagacaggttcggtggcagtgggtctgggacagacttcactctcaccatcagcagactggaggctgaagattttgcagtttattactgtcagcactatggtaactcacctccggggtacacttttggccaggggaccaagctggagatcaaac

SEQ ID NO: 3195 - protein, 110 aa, Artificial Sequence
  Description of Artificial Sequence: Synthetic polypeptide
EIVLTQSPGTLSLSPGERATLSCRASQSISGTYLHWYQQKPGQAPRLLIYGASTRATGIPDRFGGSGSGTDFTLTISRLEAEDFAVYYCQHYGNSPPGYTFGQGTKLEIK

SEQ ID NO: 3196 - protein, 11 aa, Artificial Sequence
  Description of Artificial Sequence: Synthetic peptide
QHYGNSPPGYT

SEQ ID NO: 3197 - DNA, 355 bp, Artificial Sequence
  Description of Artificial Sequence: Synthetic polynucleotide
caggtccagctggtgcagtctggggctgaggtgaagaagcctgggtcctcggtgaaggtctcctgcaaggcctctgcaggcaccttcagcacctatgctttcagctgggtgcgacaggcccctggacaaggacttgagtggatgggaacgctcatccctgtctttagtaccccatactactcacagacattgcagggcagactcacgattaccgcggaccaatccacgagcacagtctacatggaactgagcagcctgagatctgaggacacggcactttattactgtgcgagagggggaggagcagtggccggcaatgcttactggggccagggaaccctggtcaccgtctcct

SEQ ID NO: 3198 - protein, 118 aa, Artificial Sequence
  Description of Artificial Sequence: Synthetic polypeptide
QVQLVQSGAEVKKPGSSVKVSCKASAGTFSTYAFSWVRQAPGQGLEWMGTLIPVFSTPYYSQTLQGRLTITADQSTSTVYMELSSLRSEDTALYYCARGGGAVAGNAYWGQGTLVTVS

SEQ ID NO: 3199 - protein, 12 aa, Artificial Sequence
  Description of Artificial Sequence: Synthetic peptide
ARGGGAVAGNAY

SEQ ID NO: 3200 - DNA, 325 bp, Artificial Sequence; identical to SEQ ID NO: 196
  Description of Artificial Sequence: Synthetic polynucleotide

SEQ ID NO: 3201 - protein, 108 aa, Artificial Sequence; identical to SEQ ID NO: 78
  Description of Artificial Sequence: Synthetic polypeptide

SEQ ID NO: 3202 - protein, 10 aa, Artificial Sequence
  Description of Artificial Sequence: Synthetic peptide
QKYDSYSSLT

SEQ ID NO: 3203 - DNA, 358 bp, Artificial Sequence
  Description of Artificial Sequence: Synthetic polynucleotide
caggtgcagctggtgcagtctggggctgaggtgaagaagcctgggtcctcggtgaaggtctcctgcaagacttccgggggcaccttcagcaactatgctatcaactgggtccgacaggcccctggacaagggcttgagtggatgggaggcatcatccctgtctttggtacaccaaactacgcacagaggttccagggcagagtcacgatttccgcggacgaatctacgagcacttcctacatggaggtgaacagcctgacatatgaggacacggccgtgtattactgtgcgagagatgggggtgcttcggctgctgaggactactggggccagggaaccctggtcaccgtctcctcag

SEQ ID NO: 3204 - protein, 119 aa, Artificial Sequence; identical to SEQ ID NO: 75
  Description of Artificial Sequence: Synthetic polypeptide

SEQ ID NO: 3205 - protein, 12 aa, Artificial Sequence
  Description of Artificial Sequence: Synthetic peptide
ARDGGASAAEDY

SEQ ID NO: 3206 - DNA, 322 bp, Artificial Sequence
  Description of Artificial Sequence: Synthetic polynucleotide
gacatccagatgacccagtctccatcctccctgtctgcatctgtaggagacagagtcaccatctcttgccgggcaagtcagagcattagcacctatttaaattggtatcagcagaaaccagggaaagcccctaagctcctgatctatggtgcatccactttggaaactgcattcccatcaaggtttagtggcagtggatctgggacagatttcactctcaccatcagcagtctgcaacctgaagattttgcaacttactactgtcaacagagtttcagaacccctcggaccttcggccaagggacacgactggagattaaac

SEQ ID NO: 3207 - protein, 107 aa, Artificial Sequence
  Description of Artificial Sequence: Synthetic polypeptide
DIQMTQSPSSLSASVGDRVTISCRASQSISTYLNWYQQKPGKAPKLLIYGASTLETAFPSRFSGSGSGTDFTLTISSLQPEDFATYYCQQSFRTPRTFGQGTRLEIK

SEQ ID NO: 3208 - protein, 9 aa, Artificial Sequence
  Description of Artificial Sequence: Synthetic peptide
QQSFRTPRT

SEQ ID NO: 3209 - DNA, 346 bp, Artificial Sequence
  Description of Artificial Sequence: Synthetic polynucleotide
caggtgcagctggtggagtctgggggacgcgtggtccagcctgggaagtccctgagactctcctgtgcaggctcgggattcaccttcagtcactatgctatccactgggtccgccaggctccgggcaaggggctggagtgggtggcagttatatcatatgatggaagttataaatattacggagactccgtgaagggccgattcaccatctccagagacaactccaacctctatctacaaatgaatagcctgagagctgaggacacggctttgtattactgtgcgaggtcctacgctgggccctttgaccactggggccagggaaccctggtcaccgtctcctcag

SEQ ID NO: 3210 - protein, 115 aa, Artificial Sequence
  Description of Artificial Sequence: Synthetic polypeptide
QVQLVESGGRVVQPGKSLRLSCAGSGFTFSHYAIHWVRQAPGKGLEWVAVISYDGSYKYYGDSVKGRFTISRDNSNLYLQMNSLRAEDTALYYCARSYAGPFDHWGQGTLVTVSS

SEQ ID NO: 3211 - protein, 10 aa, Artificial Sequence
  Description of Artificial Sequence: Synthetic peptide
ARSYAGPFDH

SEQ ID NO: 3212 - DNA, 320 bp, Artificial Sequence
  Description of Artificial Sequence: Synthetic polynucleotide
gccatccagttgacccagtctccatcctccctgtctgcatctgtaggagacagagtcaccatcacttgccgggcaagtcagggcattagtagtgctttagcctggtatcagcagagaccagggaaacctcctaagctcctgatctatgatgcctccaatgtggaaagtggggtcccatcaaggttcagcggcagtggatctgggacagatttcactctcaccatcaacagccttcagcctgaagattttgcaacttattactgtcaccaatttaatactcacccgtccacttttggccaggggaccaagctggagatcaa

SEQ ID NO: 3213 - protein, 106 aa, Artificial Sequence
  Description of Artificial Sequence: Synthetic polypeptide
AIQLTQSPSSLSASVGDRVTITCRASQGISSALAWYQQRPGKPPKLLIYDASNVESGVPSRFSGSGSGTDFTLTINSLQPEDFATYYCHQFNTHPSTFGQGTKLEI

SEQ ID NO: 3214 - protein, 9 aa, Artificial Sequence
  Description of Artificial Sequence: Synthetic peptide
HQFNTHPST

SEQ ID NO: 3215 - DNA, 358 bp, Artificial Sequence
  Description of Artificial Sequence: Synthetic polynucleotide
caggtgcagctggtgcagtctggggctgaggtgaagaagcctgggtcctcggtgagggtctcctgcaaggcttctggaggcaccttcagtaactttgctatcagctgggtgcgacaggcccctggacaagggcttgagtggatgggaggggtcatccctctctttggtacaccaaactacgcacagaagttccagggcagagtcaccattaccgcggacgaatccacgagcacagcccacatggagctgagcagcctgagaagtgaggacacggccgtgtattactgtgcgagagaggggggagcagcagccgaatttgactactggggccagggaaccctggtcaccgtctcctcag

SEQ ID NO: 3216 - protein, 119 aa, Artificial Sequence
  Description of Artificial Sequence: Synthetic polypeptide
QVQLVQSGAEVKKPGSSVRVSCKASGGTFSNFAISWVRQAPGQGLEWMGGVIPLFGTPNYAQKFQGRVTITADESTSTAHMELSSLRSEDTAVYYCAREGGAAAEFDYWGQGTLVTVSS

SEQ ID NO: 3217 - protein, 12 aa, Artificial Sequence
  Description of Artificial Sequence: Synthetic peptide
AREGGAAAEFDY

SEQ ID NO: 3218 - DNA, 337 bp, Artificial Sequence
  Description of Artificial Sequence: Synthetic polynucleotide
gatattgtgatgactcagtctccactctccctgcccgtcacccctggagagccggcctccatctcctgcaggtctagtcagagcctcctgcatagaactggatacaactatttggattggtacctgcagaagccagggcagtctccacagctcctgatctatttgggttctaatcgggcctccggggtccctgacaggttcagtggcagtggatcaggcacagattttacactgaaaatcagcagagtggaggctgaggatgttgggttttattactgcatgcaaagtctacaaactcctcgaacttttggccaggggaccaagctggagatcaaac

SEQ ID NO: 3219 - protein, 112 aa, Artificial Sequence
  Description of Artificial Sequence: Synthetic polypeptide
DIVMTQSPLSLPVTPGEPASISCRSSQSLLHRTGYNYLDWYLQKPGQSPQLLIYLGSNRASGVPDRFSGSGSGTDFTLKISRVEAEDVGFYYCMQSLQTPRTFGQGTKLEIK

SEQ ID NO: 3220 - protein, 9 aa, Artificial Sequence
  Description of Artificial Sequence: Synthetic peptide
MQSLQTPRT

SEQ ID NO: 3221 - DNA, 355 bp, Artificial Sequence
  Description of Artificial Sequence: Synthetic polynucleotide
caggtgcagctggtgcagtctggggctgaggtgaagaagcctgggtcctcggtgagggtctcctgcaaggcttctggaggcaccctcagcaactatgctatcaggtgggtgcgagaggcccctggacaagggcttgagtggatgggagggatcatccctgtctttagaacaacaaactacgcacagcagttccagggcagagtcacaattaccgcggacgaatccacgaacacagcctacatggaactgagcagcctgagatctgaggacacggccgtttattactgtgcgagagcttttgggggtcatgggggcgactactggggccagggaaccctggtcaccgtctcctcag

SEQ ID NO: 3222 - protein, 118 aa, Artificial Sequence
  Description of Artificial Sequence: Synthetic polypeptide
QVQLVQSGAEVKKPGSSVRVSCKASGGTLSNYAIRWVREAPGQGLEWMGGIIPVFRTTNYAQQFQGRVTITADESTNTAYMELSSLRSEDTAVYYCARAFGGHGGDYWGQGTLVTVSS

SEQ ID NO: 3223 - protein, 11 aa, Artificial Sequence
  Description of Artificial Sequence: Synthetic peptide
ARAFGGHGGDY

SEQ ID NO: 3224 - DNA, 325 bp, Artificial Sequence
  Description of Artificial Sequence: Synthetic polynucleotide
gacatccagatgacccagtctccatcctccctgtctgcatctgtaggagacagagtcaccatcagttgccaggcgagtcaggacattaagaactatttaaattggtatcagcacaaaccagggaaagcccctaaactcctgatcttcgatgcatccaatctggaaacaggggtcccatcaaggttcagtggaagtggatctgggacacattttactttcaccatcagcagcctgcagcctgaagatattgcaacatattactgtcaacaatatgataatctccctcgattcactttcggcccagggaccaaagtggatatcaaac

SEQ ID NO: 3225 - protein, 108 aa, Artificial Sequence
  Description of Artificial Sequence: Synthetic polypeptide
DIQMTQSPSSLSASVGDRVTISCQASQDIKNYLNWYQHKPGKAPKLLIFDASNLETGVPSRFSGSGSGTHFTFTISSLQPEDIATYYCQQYDNLPRFTFGPGTKVDIK

SEQ ID NO: 3226 - protein, 10 aa, Artificial Sequence
  Description of Artificial Sequence: Synthetic peptide
QQYDNLPRFT

SEQ ID NO: 3227 - DNA, 355 bp, Artificial Sequence
  Description of Artificial Sequence: Synthetic polynucleotide
caggtgcagctggtgcagtctggggctgaggtgaagaagcctgggtcctcggtgaaggtctcctgcaaggcctctggaggcaccttcaccttcagcaactttcctatcagctgggtgcgacaggtccctggacaagggcttgagtgggtgggagggattctccctgtctttggtacaacaacctacgcacagaagtttcagggcagagtcacgattaccgcggacgaatccacgagcacagcctacatggagctgaccagcctcagatctgacgacacggcctactattactgtgcgactggatacagctatggtgactattggggccagggaaccctggtcatcgtctcctcag

SEQ ID NO: 3228 - protein, 118 aa, Artificial Sequence
  Description of Artificial Sequence: Synthetic polypeptide
QVQLVQSGAEVKKPGSSVKVSCKASGGTFTFSNFPISWVRQVPGQGLEWVGGILPVFGTTTYAQKFQGRVTITADESTSTAYMELTSLRSDDTAYYYCATGYSYGDYWGQGTLVIVSS

SEQ ID NO: 3229 - protein, 9 aa, Artificial Sequence
  Description of Artificial Sequence: Synthetic peptide
ATGYSYGDY

SEQ ID NO: 3230 - DNA, 325 bp, Artificial Sequence
  Description of Artificial Sequence: Synthetic polynucleotide
gacatccagatgacccagtctccatcctccctgtctgcatctgtaggagacagagtcaccatcacttgccaggcgagtcaggacattagcaactatttaaattggtttcagcagaaaccagggaaagcccctaagctcctgatctacgatgcatccaatttggaaacaggggtcccatcaaggttcagtggaagtggatctgggacagattttactttcaccatcagcagcctgcagcctgaagatattgcaacatattactgtcaacattatgataatctccctcggctcactttcggcggagggaccaaggtggagatcaaac

SEQ ID NO: 3231 - protein, 108 aa, Artificial Sequence
  Description of Artificial Sequence: Synthetic polypeptide
DIQMTQSPSSLSASVGDRVTITCQASQDISNYLNWFQQKPGKAPKLLIYDASNLETGVPSRFSGSGSGTDFTFTISSLQPEDIATYYCQHYDNLPRLTFGGGTKVEIK

SEQ ID NO: 3232 - protein, 10 aa, Artificial Sequence
  Description of Artificial Sequence: Synthetic peptide
QHYDNLPRLT

SEQ ID NO: 3233 - DNA, 355 bp, Artificial Sequence
  Description of Artificial Sequence: Synthetic polynucleotide
caggtgcagctggtgcagtctgggactgaggtgaagaagcctgggtcctcggtgaaggtctcctgcaaggcctctggaggcaccttcgggaactatgatatcagctgggtgcgacaggcccccggacaagggcttgagtggatgggagggctcatccctgtctttggaacacccaactacgcaccgaaattgcggggcagactcacgattaccgcggacgaatccacgagcacagcctacatggagctgagcagcctgagatctgaggacacggccgtttatttctgtgcgagagatgggggacaagcgtcttttgactactggggccagggaaccctggtcgccgtctcctcag

SEQ ID NO: 3234 - protein, 118 aa, Artificial Sequence
  Description of Artificial Sequence: Synthetic polypeptide
QVQLVQSGTEVKKPGSSVKVSCKASGGTFGNYDISWVRQAPGQGLEWMGGLIPVFGTPNYAPKLRGRLTITADESTSTAYMELSSLRSEDTAVYFCARDGGQASFDYWGQGTLVAVSS

SEQ ID NO: 3235 - protein, 11 aa, Artificial Sequence
  Description of Artificial Sequence: Synthetic peptide
ARDGGQASFDY

SEQ ID NO: 3236 - DNA, 337 bp, Artificial Sequence
  Description of Artificial Sequence: Synthetic polynucleotide
gatattgtgatgactcagtctccactctccctgcccgtcacccctggagagccggcctccatctcctgcaggtctagtcagagcctcctgcatcgtactggatacacctatttggattggtacctgcagaagccagggcagtctccacagctcctgatctacttgggttctaatcgggcctccggggtccctgacaggttcagtggcagtggctcaggcacagattttacactgaaaatcagcagagtggaggctgaggatgttggagtttattactgcatgcaagctctacaaactcctaagactttcggccaagggacacgactggagattaaac

SEQ ID NO: 3237 - protein, 112 aa, Artificial Sequence
  Description of Artificial Sequence: Synthetic polypeptide
DIVMTQSPLSLPVTPGEPASISCRSSQSLLHRTGYTYLDWYLQKPGQSPQLLIYLGSNRASGVPDRFSGSGSGTDFTLKISRVEAEDVGVYYCMQALQTPKTFGQGTRLEIK

SEQ ID NO: 3238 - protein, 9 aa, Artificial Sequence
  Description of Artificial Sequence: Synthetic peptide
MQALQTPKT

SEQ ID NO: 3239 - DNA, 373 bp, Artificial Sequence
  Description of Artificial Sequence: Synthetic polynucleotide
gaggtgcagctggtggagtctgggggaggcctggtcaagcctggggggtccctgagactctcctgtgcagcctctggattcacgttcagtcgttttggcatgaactgggtccgccaggctccagggaaggggctggagtgggtctcatccattgacactagcagcaataacatattctacgcagactcagtgaagggccgattcaccatctccagagacaacgccaagaactcactgtatctgcaaatgaacagcctgagcgccgaggacacggctgtttattactgtgcgagagtggagggacagtattcttatgatagtagtggttattaccactactggggccagggaaccctggtcaccgtctcctcag

SEQ ID NO: 3240 - protein, 124 aa, Artificial Sequence
  Description of Artificial Sequence: Synthetic polypeptide
EVQLVESGGGLVKPGGSLRLSCAASGFTFSRFGMNWVRQAPGKGLEWVSSIDTSSNNIFYADSVKGRFTISRDNAKNSLYLQMNSLSAEDTAVYYCARVEGQYSYDSSGYYHYWGQGTLVTVSS

SEQ ID NO: 3241 - protein, 17 aa, Artificial Sequence
  Description of Artificial Sequence: Synthetic peptide
ARVEGQYSYDSSGYYHY

SEQ ID NO: 3242 - DNA, 322 bp, Artificial Sequence
  Description of Artificial Sequence: Synthetic polynucleotide
gaaattgtgttgacacagtctccagccaccctgtctttgtctccgggggaaagagccaccctctcctgcagggccagtcagagtgttagcagctacttaggctggtaccaacagaaacctggccaggctcccaggctcctcatctatgatgcatccaagagggccactggcatcccagccaggttcagtggcagtgggtctgggacagacttcactctcaccatcagcagcctagagcctgaagattttgcagtttatcattgtcagcagcgtagccactggccatacacttttggccaggggaccaagctggagatcaaac

SEQ ID NO: 3243 - protein, 107 aa, Artificial Sequence
  Description of Artificial Sequence: Synthetic polypeptide
EIVLTQSPATLSLSPGERATLSCRASQSVSSYLGWYQQKPGQAPRLLIYDASKRATGIPARFSGSGSGTDFTLTISSLEPEDFAVYHCQQRSHWPYTFGQGTKLEIK

SEQ ID NO: 3244 - protein, 9 aa, Artificial Sequence
  Description of Artificial Sequence: Synthetic peptide
QQRSHWPYT

SEQ ID NO: 3245 - DNA, 355 bp, Artificial Sequence
  Description of Artificial Sequence: Synthetic polynucleotide
caggtgcagctggtgcagtctggggctgaggtgaagaagcctgggtcctcggtgaaggtctcctgcaaggcttctggaggcaccttcagcaactatgctttcaactgggttcgccaggcccctggacaaggacttgagtggatgggagggatcatccctgtttttggtaaactaaactacgcacagaagttccaggacagagtcacgattatcgcggacaaatccacgagcacagtctccatggaactgaacaacctgagatctgacgacactgccttttattactgtgcgagagcgatggggtctaccgggggggactactggggccagggaaccctggtcaccgtctcctcag

SEQ ID NO: 3246 - protein, 118 aa, Artificial Sequence
  Description of Artificial Sequence: Synthetic polypeptide
QVQLVQSGAEVKKPGSSVKVSCKASGGTFSNYAFNWVRQAPGQGLEWMGGIIPVFGKLNYAQKFQDRVTIIADKSTSTVSMELNNLRSDDTAFYYCARAMGSTGGDYWGQGTLVTVSS

SEQ ID NO: 3247 - protein, 11 aa, Artificial Sequence
  Description of Artificial Sequence: Synthetic peptide
ARAMGSTGGDY

SEQ ID NO: 3248 - DNA, 325 bp, Artificial Sequence
  Description of Artificial Sequence: Synthetic polynucleotide
gacatccagatgacccagtctccatcctccctgtctgcatctgtaggagacagagtcaccatcacttgccaggcgagtcaggacattagcaactatttaaattggtatcagaagaaaccagggaaagcccctaagctcctgatctacgatgcatccaatttggaaacaggggtcccatcaaggttcagtggaagtggatctgggacagattttactttcaccatcagcagcctgcagcctgaagatattgcagcatattactgtcaacagtatgataatctccctcggttcactttcggcggagggaccaacgtggagatcaaac

SEQ ID NO: 3249 - protein, 108 aa, Artificial Sequence
  Description of Artificial Sequence: Synthetic polypeptide
DIQMTQSPSSLSASVGDRVTITCQASQDISNYLNWYQKKPGKAPKLLIYDASNLETGVPSRFSGSGSGTDFTFTISSLQPEDIAAYYCQQYDNLPRFTFGGGTNVEIK

SEQ ID NO: 3250 - protein, 10 aa, Artificial Sequence
  Description of Artificial Sequence: Synthetic peptide
QQYDNLPRFT

SEQ ID NO: 3251 - DNA, 355 bp, Artificial Sequence
  Description of Artificial Sequence: Synthetic polynucleotide
caggtgcagctggtgcagtctggggctgaggtgaagaagcctgggtcctcggtgaaggtctcctgcaaggcttctggaggcaccttcagccactatgcctacaactgggtgcgacaggcccctggacaagggcttgagtggatgggagggatcatccctgtctttgacacaataacgtacgcacagaagttccagggcagagtcacgattaccgcggacgagtctacggccacagcccacatggagctgagcagcctcagatctgaggacacggccgtgtattactgtgagagaagcggtggttctagcggatctgactactggggccagggaacccaggtcaccgtctcctcag

SEQ ID NO: 3252 - protein, 118 aa, Artificial Sequence
  Description of Artificial Sequence: Synthetic polypeptide
QVQLVQSGAEVKKPGSSVKVSCKASGGTFSHYAYNWVRQAPGQGLEWMGGIIPVFDTITYAQKFQGRVTITADESTATAHMELSSLRSEDTAVYYCERSGGSSGSDYWGQGTQVTVSS

SEQ ID NO: 3253 - protein, 11 aa, Artificial Sequence
  Description of Artificial Sequence: Synthetic peptide
ERSGGSSGSDY

SEQ ID NO: 3254 - DNA, 325 bp, Artificial Sequence
  Description of Artificial Sequence: Synthetic polynucleotide
gacatccagatgacccagtctccatcctccctgtctgcatctgtgggagacagagtcaccatcacttgccaggcgagccaggacatcaataactatttaaattggtatcagaagaaaccagggaaagcccctaagctcctgatctacgatgcatccaatttggaaacaggggtcccatcaaggttcagtggaagtagatctgggacagattttactttcaccatcagcagcctgcagcctgaagatattgcaacatattactgtcaacagtatgataatctccctcggctcactttcggcggagggaccaaggtggagatcaaac

SEQ ID NO: 3255 - protein, 108 aa, Artificial Sequence
  Description of Artificial Sequence: Synthetic polypeptide
DIQMTQSPSSLSASVGDRVTITCQASQDINNYLNWYQKKPGKAPKLLIYDASNLETGVPSRFSGSRSGTDFTFTISSLQPEDIATYYCQQYDNLPRLTFGGGTKVEIK

SEQ ID NO: 3256 - protein, 10 aa, Artificial Sequence
  Description of Artificial Sequence: Synthetic peptide
QQYDNLPRLT

SEQ ID NO: 3257 - DNA, 355 bp, Artificial Sequence
  Description of Artificial Sequence: Synthetic polynucleotide
caggtgcagctggtgcagtctggggctgaggtgaagaagcctgggtcctcggtgaaggtctcctgcacggcttctggaggcaccttcagcaattttgctatccactgggtgcgacaggcccctggacaaggacttgagtggatggggcggatcatccctgtcttcggtacaccaaattacgcacagatgttccagggcagagtcacgattaccgcggacgaatccaggaacacagcctatttggttctgagcagcctgaggtccgaggacacggccatttattactgtgcgcgagacggggggcagggctccttggactactggggccagggaaccctggtcaccgtctcctcag

SEQ ID NO: 3258 - protein, 118 aa, Artificial Sequence
  Description of Artificial Sequence: Synthetic polypeptide
QVQLVQSGAEVKKPGSSVKVSCTASGGTFSNFAIHWVRQAPGQGLEWMGRIIPVFGTPNYAQMFQGRVTITADESRNTAYLVLSSLRSEDTAIYYCARDGGQGSLDYWGQGTLVTVSS

SEQ ID NO: 3259 - protein, 11 aa, Artificial Sequence
  Description of Artificial Sequence: Synthetic peptide
ARDGGQGSLDY

SEQ ID NO: 3260 - DNA, 337 bp, Artificial Sequence
  Description of Artificial Sequence: Synthetic polynucleotide
gatattgtgatgactcagtctccactctccctgcccgtcacccctggagagccggcctccatctcctgcaggtctagtcagagcctcctgcatagaactggatacaactatttggattggtacctgcagaagccagggcagtctccgcagctcctgatctatttgggttctaatcgggcctccggggtccctgacaggttcagtggcagtggatcaggcacagattttacactgaaaatcagcagagtggaggctgaggatgttggggtttattactgcatgcaacctctacaaactcctcacacttttggccaggggaccaagctggagatcaaac

SEQ ID NO: 3261 - protein, 112 aa, Artificial Sequence
  Description of Artificial Sequence: Synthetic polypeptide
DIVMTQSPLSLPVTPGEPASISCRSSQSLLHRTGYNYLDWYLQKPGQSPQLLIYLGSNRASGVPDRFSGSGSGTDFTLKISRVEAEDVGVYYCMQPLQTPHTFGQGTKLEIK

SEQ ID NO: 3262 - protein, 9 aa, Artificial Sequence
  Description of Artificial Sequence: Synthetic peptide
MQPLQTPHT

SEQ ID NO: 3263 - DNA, 370 bp, Artificial Sequence
  Description of Artificial Sequence: Synthetic polynucleotide
gaggtgcagctgttggagtctgggggagggttggtacagcggggggggtccctgagactctcctgtgcagcctctggattcacctttagtaactatgacttgggctgggtccgccaggtttcaggaaagccgctggagtgggtctcagcttttagttttcgtagtggtagcacatactacgcagactccgtgaagggccggttcaccatctccagggacagttccaagaacacgctgtatctgcaaatgaacagcctgagagccgaggacacggccgtctattactgtgcgaggtattacgattattggagtggccacctggggtacttcgatctctggggccgtggcaccctggtctctgtctcctcag

SEQ ID NO: 3264 - protein, 123 aa, Artificial Sequence
  Description of Artificial Sequence: Synthetic polypeptide
EVQLLESGGGLVQRGGSLRLSCAASGFTFSNYDLGWVRQVSGKPLEWVSAFSFRSGSTYYADSVKGRFTISRDSSKNTLYLQMNSLRAEDTAVYYCARYYDYWSGHLGYFDLWGRGTLVSVSS

SEQ ID NO: 3265 - protein, 16 aa, Artificial Sequence
  Description of Artificial Sequence: Synthetic peptide
ARYYDYWSGHLGYFDL

SEQ ID NO: 3266 - DNA, 322 bp, Artificial Sequence
  Description of Artificial Sequence: Synthetic polynucleotide
gaaattgtgttgacacagtctccagccaccctgtctttgtctccaggggaaagagccaccctctcctgcagggccagtcagagtgttagcagctacttaggctggtaccaacagaagcctggccaggctcccaggctcctcatttatgaagcatctaacagggccactggcatcccagccaggttcagtggcagtgggtctgggacagacttcactctcaccatcagcagcctagagcctgaagattttgcagtttattactgtcagcagtgtagcaactggccagggacgttcggccaagggaccaaggtggaattcaaac

SEQ ID NO: 3267 - protein, 107 aa, Artificial Sequence
  Description of Artificial Sequence: Synthetic polypeptide
EIVLTQSPATLSLSPGERATLSCRASQSVSSYLGWYQQKPGQAPRLLIYEASNRATGIPARFSGSGSGTDFTLTISSLEPEDFAVYYCQQCSNWPGTFGQGTKVEFK

SEQ ID NO: 3268 - protein, 9 aa, Artificial Sequence
  Description of Artificial Sequence: Synthetic peptide
QQCSNWPGT

SEQ ID NO: 3269 - DNA, 355 bp, Artificial Sequence
  Description of Artificial Sequence: Synthetic polynucleotide
caggtgcagctggtgcagtctggggctgaggtgaagaagcctgggtcctcggtgaaggtctcctgcaaggcttctggaggcaccttcagccactatcctttcagctgggtgcgacaggcccctggtcaaggacttgagtggatgggcgggatcctccccatctttactacaacaaactacgcacagaagttccagggcagagtcacgatttccgcggacgaatccacgagcacagcttacatggaattgagcagcctgagatctgatgacacggccgtgtattactgtacgagaggtgggggtagtagtggttatttctattggggccagggaaccctggtcaccgtctcctcag

SEQ ID NO: 3270 - protein, 118 aa, Artificial Sequence
  Description of Artificial Sequence: Synthetic polypeptide
QVQLVQSGAEVKKPGSSVKVSCKASGGTFSHYPFSWVRQAPGQGLEWMGGILPIFTTTNYAQKFQGRVTISADESTSTAYMELSSLRSDDTAVYYCTRGGGSSGYFYWGQGTLVTVSS

SEQ ID NO: 3271 - protein, 11 aa, Artificial Sequence
  Description of Artificial Sequence: Synthetic peptide
TRGGGSSGYFY

SEQ ID NO: 3272 - DNA, 325 bp, Artificial Sequence
  Description of Artificial Sequence: Synthetic polynucleotide
gacatccagatgacccagtctccatcctccctgtctgcatctgtgggagacagagtcaccatcacttgccaggcgagtcaggacattagcgactatttaaattggtatcagcacaaaccagggaaagcccctaagctcctgatctatgatgcatccaatttggaaacaggggtcccatcaaggctcagtggaagtggatctgggacatattttactttgaccatcagcagcctgcagcctgaagatattgcaacatattactgtcaacagtatgataatcgcccttcgttcagttttggccaggggaccaagctggagatcaaac

SEQ ID NO: 3273 - protein, 108 aa, Artificial Sequence
  Description of Artificial Sequence: Synthetic polypeptide
DIQMTQSPSSLSASVGDRVTITCQASQDISDYLNWYQHKPGKAPKLLIYDASNLETGVPSRLSGSGSGTYFTLTISSLQPEDIATYYCQQYDNRPSFSFGQGTKLEIK

SEQ ID NO: 3274 - protein, 10 aa, Artificial Sequence
  Description of Artificial Sequence: Synthetic peptide
QQYDNRPSFS

SEQ ID NO: 3275 - DNA, 358 bp, Artificial Sequence
  Description of Artificial Sequence: Synthetic polynucleotide
caggtgcagctggtggagtctgggggaggcgtggtccagcctgggaggtccctgagactctcctgtgcagcgtctggattcaccttcagtcactatggcatgcactgggtccgccaggctccaggcaaggggctggagtgggtggcagttatttggtttgatggaagtagtaaatactatgcagactccgtgaagggccgattcaccatctccagagacaattccaagaacacgctgtatctgcaagtgaacagcctgagagccgaggacacggctgtatattactgtgcgcttctgagcgggagtagtggttatcgcgatctctggggccgtggcaccctggtcactgtgtcctcag

SEQ ID NO: 3276 - protein, 119 aa, Artificial Sequence
  Description of Artificial Sequence: Synthetic polypeptide
QVQLVESGGGVVQPGRSLRLSCAASGFTFSHYGMHWVRQAPGKGLEWVAVIWFDGSSKYYADSVKGRFTISRDNSKNTLYLQVNSLRAEDTAVYYCALLSGSSGYRDLWGRGTLVTVSS

SEQ ID NO: 3277 - protein, 12 aa, Artificial Sequence
  Description of Artificial Sequence: Synthetic peptide
ALLSGSSGYRDL

SEQ ID NO: 3278 - DNA, 325 bp, Artificial Sequence
  Description of Artificial Sequence: Synthetic polynucleotide
gacatccagatgacccagtctccatcctccctgtctgcatctgtaggagacagagtcaccatcacttgccaggcgagtcaggacattagcaactatttaaattggtatcagcagaaaccagggaaagcccctaagctcctgatctacgatgcatccaatttggaaacaggggtcccatcaaggttcagtggaagtggatctgggacagattttactttcaccatcagcagcctgcagcctgaggatattgcaacatattactgtctacagtatgataatctccctccgtacacttttggccaggggaccaagctggagatcaaac

SEQ ID NO: 3279 - protein, 108 aa, Artificial Sequence
  Description of Artificial Sequence: Synthetic polypeptide
DIQMTQSPSSLSASVGDRVTITCQASQDISNYLNWYQQKPGKAPKLLIYDASNLETGVPSRFSGSGSGTDFTFTISSLQPEDIATYYCLQYDNLPPYTFGQGTKLEIK

SEQ ID NO: 3280 - protein, 10 aa, Artificial Sequence
  Description of Artificial Sequence: Synthetic peptide
LQYDNLPPYT

SEQ ID NO: 3281 - DNA, 364 bp, Artificial Sequence
  Description of Artificial Sequence: Synthetic polynucleotide
caggtgcagctggtgcagtctggggctgaggtgaagaagcctggggcctcagtgaaggtttcctgcaaggcatctggatacaccttcaccacctactatatacactgggtgcgacaggcccctggacaagggcctgagtggatgggagtaatcaaccctactggtggtaacacaaactacgcacagaagttccagggcagagtcaccatgaccggggacacgtccacgagcacaatgtacatggacctgagcagactgagatctgaggacacggccgtgtattattgtgctagggggaagtgggaactaggagagagtagttttgatatctggggccaagggacaatggtcaccgtctcttcag

SEQ ID NO: 3282 - protein, 121 aa, Artificial Sequence
  Description of Artificial Sequence: Synthetic polypeptide
QVQLVQSGAEVKKPGASVKVSCKASGYTFTTYYIHWVRQAPGQGPEWMGVINPTGGNTNYAQKFQGRVTMTGDTSTSTMYMDLSRLRSEDTAVYYCARGKWELGESSFDIWGQGTMVTVSS

SEQ ID NO: 3283 - protein, 14 aa, Artificial Sequence
  Description of Artificial Sequence: Synthetic peptide
ARGKWELGESSFDI

SEQ ID NO: 3284 - DNA, 322 bp, Artificial Sequence
  Description of Artificial Sequence: Synthetic polynucleotide
gacatccagatgacccagtctccatcctccctgtctgcatctgtaggagacagagtcaccttcacttgccaggcgagtcaggacattaggcaccatttaaattggtatcagcagaaaccagggaaagccccaaaactcctgatcttcgatgcatccaatttggaaacaggggtcccatcaaggttcagtggaagtggatctgggacagattttactttcaccatcagcagcctgcagcctgaagattttgcaacatattactgtcaacagtatgatgatgtcccgctcactttcggcggagggaccaaggtggacatcaaac

SEQ ID NO: 3285 - protein, 107 aa, Artificial Sequence
  Description of Artificial Sequence: Synthetic polypeptide
DIQMTQSPSSLSASVGDRVTFTCQASQDIRHHLNWYQQKPGKAPKLLIFDASNLETGVPSRFSGSGSGTDFTFTISSLQPEDFATYYCQQYDDVPLTFGGGTKVDIK

SEQ ID NO: 3286 - protein, 9 aa, Artificial Sequence
  Description of Artificial Sequence: Synthetic peptide
QQYDDVPLT

SEQ ID NO: 3287 - DNA, 373 bp, Artificial Sequence
  Description of Artificial Sequence: Synthetic polynucleotide
gaggtgcagctggtggagtctgggggcgggttgatacagccgggggggtctctgagactctcctgtgcagcctctggattctccttcagttcccatagcatgaactgggtccgccaggctccagggaaggggctggagtgggtttcatacattagtagtagtagtattgacatatattatgcagactctgtgaagggccgattcgccatctccagagacaatggcaggaacacattgtatctgcaaatgaacagcctgagagccgaggacacggctgtatatttctgtgcgagagagacatacgaatctgggagtggttattatgaatacttcgactactggggccagggaaccctggtcaccgtctcctcag

SEQ ID NO: 3288 - protein, 124 aa, Artificial Sequence
  Description of Artificial Sequence: Synthetic polypeptide
EVQLVESGGGLIQPGGSLRLSCAASGFSFSSHSMNWVRQAPGKGLEWVSYISSSSIDIYYADSVKGRFAISRDNGRNTLYLQMNSLRAEDTAVYFCARETYESGSGYYEYFDYWGQGTLVTVSS

SEQ ID NO: 3289 - protein, 17 aa, Artificial Sequence
  Description of Artificial Sequence: Synthetic peptide
ARETYESGSGYYEYFDY

SEQ ID NO: 3290 - DNA, 325 bp, Artificial Sequence
  Description of Artificial Sequence: Synthetic polynucleotide
gacatccagatgacccagtctccttccaccctgtctgcttctttaggagacagagtcaccatcacttgccgggccagtcagactattagtagatggttggcctggtatcagcagaaaccagggaaagcccctaaactcctcatctatagggcgtccaatttacatagtggggtcccatcaaggttcagcggcagtggatctgggacagaattcactctcaccatcagcagcctgcagcctgatgattctgccacttattactgccaacagtataatactttttctcggctcacgttcggcggagggaccaaggtggagttcaaac

SEQ ID NO: 3291 - protein, 108 aa, Artificial Sequence
  Description of Artificial Sequence: Synthetic polypeptide
DIQMTQSPSTLSASLGDRVTITCRASQTISRWLAWYQQKPGKAPKLLIYRASNLHSGVPSRFSGSGSGTEFTLTISSLQPDDSATYYCQQYNTFSRLTFGGGTKVEFK

SEQ ID NO: 3292 - protein, 10 aa, Artificial Sequence
  Description of Artificial Sequence: Synthetic peptide
QQYNTFSRLT

SEQ ID NO: 3293 - DNA, 361 bp, Artificial Sequence
  Description of Artificial Sequence: Synthetic polynucleotide
gaggtgcagctggtggagtctgggggaggcttggtacagcctggggggtccctgagactctcctgtgcagcctctggattcaccttcaggaccttcaacatgcactgggtccgccaggctccagggaaggggctggagtgggtttcatatatcagtgatactagtagtgaaacatactacggagactctgtggagggccgattcaccatctccagagacaatgccaagaactcactgtttctgcaaatgaacagcctgagagacgaggacacggctgtgtattactgtgtgagaccttccgaagcgggctatagttattttgaccactggggccggggaaccctggtcaccgtcgcctcag

SEQ ID NO: 3294 - protein, 120 aa, Artificial Sequence
  Description of Artificial Sequence: Synthetic polypeptide
EVQLVESGGGLVQPGGSLRLSCAASGFTFRTFNMHWVRQAPGKGLEWVSYISDTSSETYYGDSVEGRFTISRDNAKNSLFLQMNSLRDEDTAVYYCVRPSEAGYSYFDHWGRGTLVTVAS

SEQ ID NO: 3295 - protein, 13 aa, Artificial Sequence
  Description of Artificial Sequence: Synthetic peptide
VRPSEAGYSYFDH

SEQ ID NO: 3296 - DNA, 322 bp, Artificial Sequence
  Description of Artificial Sequence: Synthetic polynucleotide
gacatccagatgacccagtctccttccaccctgtctgcatctgtaggagacagagtcaccatcacttgccgggccagtcagactattagtaggtggttggcctggtatcagcaaaaaccagggaaagcccctaaactcctgatctataaggcgtctggtttagaaagtggggtcccaccaaggttcagcggcagtggatctgggacagaattcactctcaccatcagcagcctgcagcctgaggattttgcaacttattactgccaacaatataatacttattctcaactcactttcggcggagggaccaaggtggagatca

SEQ ID NO: 3297 - protein, 107 aa, Artificial Sequence
  Description of Artificial Sequence: Synthetic polypeptide
DIQMTQSPSTLSASVGDRVTITCRASQTISRWLAWYQQKPGKAPKLLIYKASGLESGVPPRFSGSGSGTEFTLTISSLQPEDFATYYCQQYNTYSQLTFGGGTKVEI

SEQ ID NO: 3298 - protein, 10 aa, Artificial Sequence
  Description of Artificial Sequence: Synthetic peptide
QQYNTYSQLT

SEQ ID NO: 3299 - DNA, 355 bp, Artificial Sequence
  Description of Artificial Sequence: Synthetic polynucleotide
caggtgcagctggtgcagtctggggctgaggtgaagaagcctgggtcctcggtgaaggtctcctgcaaggcttctggaggcaccttcagcaactatgctatcaactgggtgcgacaggcccctggacaagggcttgagtggatgggagggatcatccctatctttcatacaacaaattacgcacagaagttccagggcagagtcacgattaccgcggacaaatccacgagcacagcctacatggagctgaacagcctgagatctgaggacacggccatgtattactgtgcgagagagtttggtagcacggggggggcctactggggccagggatccttggtcaccgtctcctcag

SEQ ID NO: 3300 - protein, 118 aa, Artificial Sequence
  Description of Artificial Sequence: Synthetic polypeptide
QVQLVQSGAEVKKPGSSVKVSCKASGGTFSNYAINWVRQAPGQGLEWMGGIIPIFHTTNYAQKFQGRVTITADKSTSTAYMELNSLRSEDTAMYYCAREFGSTGGAYWGQGSLVTVSS

SEQ ID NO: 3301 - protein, 11 aa, Artificial Sequence
  Description of Artificial Sequence: Synthetic peptide
AREFGSTGGAY

SEQ ID NO: 3302 - DNA, 325 bp, Artificial Sequence
  Description of Artificial Sequence: Synthetic polynucleotide
gacatccagatgacccagtctccatcctccctgtctgcatctgtaggagacagagtcaccatcacttgccaggcgagtcaggacattagtaactatttaaattggtatcagcagaaaccagggaaagcccctaagctcctgatctacgatgcattcaatttggaaacaggggtcccatcaaggttcagtggaggtgggtctgggacagactttactttcaccatcagcagcctgcagcctgaagatattgcaacatattactgtcaacagtatgataatctccctcgatacactttcggcggagggaccaaggtggagatcaaac

SEQ ID NO: 3303 - protein, 108 aa, Artificial Sequence
  Description of Artificial Sequence: Synthetic polypeptide
DIQMTQSPSSLSASVGDRVTITCQASQDISNYLNWYQQKPGKAPKLLIYDAFNLETGVPSRFSGGGSGTDFTFTISSLQPEDIATYYCQQYDNLPRYTFGGGTKVEIK

SEQ ID NO: 3304 - protein, 10 aa, Artificial Sequence
  Description of Artificial Sequence: Synthetic peptide
QQYDNLPRYT

SEQ ID NO: 3305 - DNA, 355 bp, Artificial Sequence
  Description of Artificial Sequence: Synthetic polynucleotide
caggtgcagctggtgcagtctggggctgaagtgaagaagcctgggtcctcggtgaaggtctcctgcaaggcttctggaggcaccttcaggaactatggtttcacctgggtgcgactggcccctggtcaagggcttgagtggatgggagggatcatccctgtctttggtacagcaaagtatgcacagaagttccagggcagagtcacgattaacgcggacgaatcaacgagcacagtcttcatggagttgagcagcctgagatctgaggacacggccgtctattactgtgcgagagaggatagcagccccgcccccgactactggggccagggaaccctggtcaccgtctcctcag

SEQ ID NO: 3306 - protein, 118 aa, Artificial Sequence
  Description of Artificial Sequence: Synthetic polypeptide
QVQLVQSGAEVKKPGSSVKVSCKASGGTFRNYGFTWVRLAPGQGLEWMGGIIPVFGTAKYAQKFQGRVTINADESTSTVFMELSSLRSEDTAVYYCAREDSSPAPDYWGQGTLVTVSS

SEQ ID NO: 3307 - protein, 11 aa, Artificial Sequence
  Description of Artificial Sequence: Synthetic peptide
AREDSSPAPDY

SEQ ID NO: 3308 - DNA, 340 bp, Artificial Sequence
  Description of Artificial Sequence: Synthetic polynucleotide
gatattgtgatgacccagactccactctctctgtccgtcacccctggacagccggcctccatctcctgcaagtccagtcagcgcctcctgcatcgtgatggaaagacctatttgaattggtacctgcagaagccaggccagcctccacagctcctgatctatgaagtttccaaccgcttctctggagtgccagataggttcggtggcagcgggtcagggacagatttcacactgacaatcagccgggtggaggctgaggatgttggggtttattactgcatgcaaagcattcagcttctcatgtacacttttggccaggggaccaagctggagatcaaac

SEQ ID NO: 3309 - protein, 113 aa, Artificial Sequence
  Description of Artificial Sequence: Synthetic polypeptide
DIVMTQTPLSLSVTPGQPASISCKSSQRLLHRDGKTYLNWYLQKPGQPPQLLIYEVSNRFSGVPDRFGGSGSGTDFTLTISRVEAEDVGVYYCMQSIQLLMYTFGQGTKLEIK

SEQ ID NO: 3310 - protein, 10 aa, Artificial Sequence
  Description of Artificial Sequence: Synthetic peptide
MQSIQLLMYT

SEQ ID NO: 3311 - DNA, 351 bp, Artificial Sequence
  Description of Artificial Sequence: Synthetic polynucleotide
caggtgcagctggtgcagtctggggctgaggtgaagaagcctgggtcctcggtgaaagtctcctgcaaggcttctggaggcaccttcagcaactatgctttcaactgggtgcgacaggcccccggacaagggcttgagtggctgggagggatcatccctgcctttggaacaccaaactacgcacagaagttccagggcagagtcacacttaccgcggacgcgtcgacgagcacagtctatatggacctgagcagcctgagatctgaggacacggccctttattactgtgcgacagggggctatactttgtgtaactactggggccagggaaccctggtcaccgtctcctca

SEQ ID NO: 3312 - protein, 117 aa, Artificial Sequence
  Description of Artificial Sequence: Synthetic polypeptide
QVQLVQSGAEVKKPGSSVKVSCKASGGTFSNYAFNWVRQAPGQGLEWLGGIIPAFGTPNYAQKFQGRVTLTADASTSTVYMDLSSLRSEDTALYYCATGGYTLCNYWGQGTLVTVSS

SEQ ID NO: 3313 - protein, 10 aa, Artificial Sequence
  Description of Artificial Sequence: Synthetic peptide
ATGGYTLCNY

SEQ ID NO: 3314 - DNA, 325 bp, Artificial Sequence
  Description of Artificial Sequence: Synthetic polynucleotide
gacatccagatgacccagtctccatcctccctgtctgcatctgtaggagacagagtcaccatcacttgccaggcgagtcaggacattaccaactatttaaattggtatcagcacaaaccaggggaagcccctaaactcctgatctacgatgcttccaatttggaaacaggggtcccatcaaggttcagtggaagtggatctgggacacattttactttcaccatcagcagcctgcagcctgaagacattgcaacatattactgtcagcactatgatagtctcccgtcgctcgctttcggcggagggaccaaggtggagatcaaac

SEQ ID NO: 3315 - protein, 108 aa, Artificial Sequence
  Description of Artificial Sequence: Synthetic polypeptide
DIQMTQSPSSLSASVGDRVTITCQASQDITNYLNWYQHKPGEAPKLLIYDASNLETGVPSRFSGSGSGTHFTFTISSLQPEDIATYYCQHYDSLPSLAFGGGTKVEIK

SEQ ID NO: 3316 - protein, 10 aa, Artificial Sequence
  Description of Artificial Sequence: Synthetic peptide
QHYDSLPSLA

SEQ ID NO: 3317 - DNA, 364 bp, Artificial Sequence
  Description of Artificial Sequence: Synthetic polynucleotide
gaggtgcagctggtggagtctggaggaggcttgatccagccgggggggtccctgagactctcctgtgcagcctctgggttcaccgtcagtgacaactacataaactgggtccgccaggctcccgggaagggactggagtgggtctcagttatttataatgatcatcgcagatactacgcagactccgttaacgaccgattcaccatctccagagacaattccaagaatatggtgtatcttcaaatgaatagcctgagacccgaggacacggccgtgtattactgtgcgagagaagataagggaaaagaaccaggttgggggtacatggactcctggggcccgggaaccctggtcaccgtctcct

SEQ ID NO: 3318 - protein, 121 aa, Artificial Sequence
  Description of Artificial Sequence: Synthetic polypeptide
EVQLVESGGGLIQPGGSLRLSCAASGFTVSDNYINWVRQAPGKGLEWVSVIYNDHRRYYADSVNDRFTISRDNSKNMVYLQMNSLRPEDTAVYYCAREDKGKEPGWGYMDSWGPGTLVTVS

SEQ ID NO: 3319 - protein, 16 aa, Artificial Sequence
  Description of Artificial Sequence: Synthetic peptide
AREDKGKEPGWGYMDS

SEQ ID NO: 3320 - DNA, 323 bp, Artificial Sequence
  Description of Artificial Sequence: Synthetic polynucleotide
gacatccagatgacccagtctccatcctccctgtctgcatctgtaggagacagagtcaccatcacttgccggtcaagtcagagcataatcacttatttaaattggtatcagcagaaaccagggaaagcccctaaggtcctgatctatgctgcatccagtttgcaaagtggggtcccatcaaggttcagtggcagtggatctgggacagatttcactctcaccatcaccaatctgcaacctgaagattttgcaacttactattgtcaacagagttacagtacccctccgtacacttttggccaggggaccaagctggagatcaa

SEQ ID NO: 3321 - protein, 107 aa, Artificial Sequence
  Description of Artificial Sequence: Synthetic polypeptide
DIQMTQSPSSLSASVGDRVTITCRSSQSIITYLNWYQQKPGKAPKVLIYAASSLQSGVPSRFSGSGSGTDFTLTITNLQPEDFATYYCQQSYSTPPYTFGQGTKLEI

SEQ ID NO: 3322 - protein, 10 aa, Artificial Sequence
  Description of Artificial Sequence: Synthetic peptide
QQSYSTPPYT

SEQ ID NO: 3323 - DNA, 364 bp, Artificial Sequence
  Description of Artificial Sequence: Synthetic polynucleotide
caggtgcagctggtgcagtctggggctgaggtgaagaagcctggggcctcagtgagggtttcctgccaggcatctggatacatcttcaccacctactatatgcactgggtgcggcaggcccctggacaaggccttgagtggatgggactaatcaaccctagtgttggtaccacaacctacgcacagaagtttcagggcagagtcaccatgaccagggacacgtccacgaggacagtctatatggacctgaggagcctgagatctgaagacacggccgtgtattactgtgctcgggggagatgggatctaggggagagttctcttgatatttggggccaagggacaacggtcatcgtctcttcag

SEQ ID NO: 3324 - protein, 121 aa, Artificial Sequence
  Description of Artificial Sequence: Synthetic polypeptide
QVQLVQSGAEVKKPGASVRVSCQASGYIFTTYYMHWVRQAPGQGLEWMGLINPSVGTTTYAQKFQGRVTMTRDTSTRTVYMDLRSLRSEDTAVYYCARGRWDLGESSLDIWGQGTTVIVSS

SEQ ID NO: 3325 - protein, 14 aa, Artificial Sequence
  Description of Artificial Sequence: Synthetic peptide
ARGRWDLGESSLDI

SEQ ID NO: 3326 - DNA, 322 bp, Artificial Sequence
  Description of Artificial Sequence: Synthetic polynucleotide
gacatccagatgacccagtctccatcctccctgtctgcatttgtaggagacagagtcaccctcacttgccaggcgagtcaggacattgggcaccatttaaattggtatcaacagaaaccagggaaagcccccaagctcctgatctacgatgcatccaccttggaaacaggggtcccatcaaggttcagtggaagtggatctgggacagattttagtttcaccatcagcagcctgcagcctgaagatattgcaagatattactgtcaacagtatgataagcacccgctcactttcggcggagggaccaaggtggagatcaaac

SEQ ID NO: 3327 - protein, 107 aa, Artificial Sequence
  Description of Artificial Sequence: Synthetic polypeptide
DIQMTQSPSSLSAFVGDRVTLTCQASQDIGHHLNWYQQKPGKAPKLLIYDASTLETGVPSRFSGSGSGTDFSFTISSLQPEDIARYYCQQYDKHPLTFGGGTKVEIK

SEQ ID NO: 3328 - protein, 9 aa, Artificial Sequence
  Description of Artificial Sequence: Synthetic peptide
QQYDKHPLT

SEQ ID NO: 3329 - DNA, 361 bp, Artificial Sequence
  Description of Artificial Sequence: Synthetic polynucleotide
caggtgcagctggtgcagtctggggctgaggtgaagaagcctgggtcctcggtgaaggtctcctgcaaggcttctgggggcgccttcagcaactatgctgtcaactgggtgcgacaggcccctggacaagggcttgagtggatgggtgggatcatccctgtctttaatacaccgaactacgcacagagattccggggcagagtcaccattaccgcggacgagtccacgagcacagcctacatggagctgagcagcctgagatctgaggacacggccatgtattactgtgcgagaggaggggatagtagtaattccttgggggactactggggccagggaaccctggtcaccgtctcctcag

SEQ ID NO: 3330 - protein, 120 aa, Artificial Sequence
  Description of Artificial Sequence: Synthetic polypeptide
QVQLVQSGAEVKKPGSSVKVSCKASGGAFSNYAVNWVRQAPGQGLEWMGGIIPVFNTPNYAQRFRGRVTITADESTSTAYMELSSLRSEDTAMYYCARGGDSSNSLGDYWGQGTLVTVSS

SEQ ID NO: 3331 - protein, 13 aa, Artificial Sequence
  Description of Artificial Sequence: Synthetic peptide
ARGGDSSNSLGDY

SEQ ID NO: 3332 - DNA, 334 bp, Artificial Sequence
  Description of Artificial Sequence: Synthetic polynucleotide
gatattgtgatgactcagtctccactctccctgcccgtcacccctggagagccggcctccatctcctgcaggtctagtcagagcctcctacatagaactggatacacctatttggattggtatatgcagaagccagggcagtctccacacctcctgatctatttgggttctactcgggcctccggggtccctgacaggttcagtggcagtggatcaggcacagattttacactgaaaatcagcagagtggaggctgaggatgttggggtttattactgcatgcaagctctacaaactccgtacacttttggccaagggaccaagctggagatca

SEQ ID NO: 3333 - protein, 111 aa, Artificial Sequence
  Description of Artificial Sequence: Synthetic polypeptide
DIVMTQSPLSLPVTPGEPASISCRSSQSLLHRTGYTYLDWYMQKPGQSPHLLIYLGSTRASGVPDRFSGSGSGTDFTLKISRVEAEDVGVYYCMQALQTPYTFGQGTKLEI

SEQ ID NO: 3334 - protein, 9 aa, Artificial Sequence
  Description of Artificial Sequence: Synthetic peptide
MQALQTPYT

SEQ ID NO: 3335 - DNA, 355 bp, Artificial Sequence
  Description of Artificial Sequence: Synthetic polynucleotide
caggtgcagctggtgcagtctggggctgaggtgaagaagcctgggtcgtcggtgaaggtctcctgcaaggcttctggaggcaccttcagccactatgctttcaactgggtgcgacaggcccctggacaaggacttgagtggatgggaggcatcatccctgtctttagaacaataaactacgcacagaggttccagggcagagtcaccattaccgcggacgaatccacgagcacagcctacatggagttgagcagtctgcgatctgaggacacggccgtgtattactgtgcgagagcaatgggatctactgggggggactactggggccagggaaccctggtcaccgtctcctcag

SEQ ID NO: 3336 - protein, 118 aa, Artificial Sequence
  Description of Artificial Sequence: Synthetic polypeptide
QVQLVQSGAEVKKPGSSVKVSCKASGGTFSHYAFNWVRQAPGQGLEWMGGIIPVFRTINYAQRFQGRVTITADESTSTAYMELSSLRSEDTAVYYCARAMGSTGGDYWGQGTLVTVSS

SEQ ID NO: 3337 - protein, 11 aa, Artificial Sequence
  Description of Artificial Sequence: Synthetic peptide
ARAMGSTGGDY

SEQ ID NO: 3338 - DNA, 323 bp, Artificial Sequence
  Description of Artificial Sequence: Synthetic polynucleotide
gacatccagatgacccagtctccatcctccctgtctgcatctataggagacagagtcaccatcacttgccaggcgagtcaggacattcgcaactatttaaattggtatcacctgaaatcagggaaggcccctcagctcctgatctacgatgcatccaatttggaaacaggtgtcccatcaaggttcagtggaagtggatctgggacacattttactttcaccatcagcagcctgcagcctgaagatattggaacatattactgtcaaaactataataatcgccctgagctcaccttcggcggagggaccaaggtggagatcaa

SEQ ID NO: 3339 - protein, 107 aa, Artificial Sequence
  Description of Artificial Sequence: Synthetic polypeptide
DIQMTQSPSSLSASIGDRVTITCQASQDIRNYLNWYHLKSGKAPQLLIYDASNLETGVPSRFSGSGSGTHFTFTISSLQPEDIGTYYCQNYNNRPELTFGGGTKVEI

SEQ ID NO: 3340 - protein, 10 aa, Artificial Sequence
  Description of Artificial Sequence: Synthetic peptide
QNYNNRPELT

SEQ ID NO: 3341 - DNA, 355 bp, Artificial Sequence
  Description of Artificial Sequence: Synthetic polynucleotide
caggtgcagctggtgcagtctggggctgcggtgaagaagcctgggtcctcggtgaaggtcgcctgcaaggcttctggaggcaacttcaggaattatgctatcgcctgggtgcgacaggcccctggacaagggctggagtggatgggagagatcatccctgtctttggtacaccaaagtacgcacagaagttccaggacagagtcacgattatcgcggacgaatccacgagcactggctacatggagctgaacagcctgcgatctgaggacacggccgtatattactgtgcgagagatgggggacaggcctcatttgactactggggccagggaaccctggtcaccgtctcctcag

SEQ ID NO: 3342 - protein, 118 aa, Artificial Sequence
  Description of Artificial Sequence: Synthetic polypeptide
QVQLVQSGAAVKKPGSSVKVACKASGGNFRNYAIAWVRQAPGQGLEWMGEIIPVFGTPKYAQKFQDRVTIIADESTSTGYMELNSLRSEDTAVYYCARDGGQASFDYWGQGTLVTVSS

SEQ ID NO: 3343 - protein, 11 aa, Artificial Sequence
  Description of Artificial Sequence: Synthetic peptide
ARDGGQASFDY

SEQ ID NO: 3344 - DNA, 337 bp, Artificial Sequence
  Description of Artificial Sequence: Synthetic polynucleotide
  modified_base (41)..(41): a, c, t, g, unknown or other
gatattgtgatgactcagtctccactctccctgcccgtcanccctggagagccggcctccatctcctgcagatctagtcagagcctcctacatagaattggatacaactatttggattggtacctgcagaagccagggcagtctccacaactcctgatctatttgggttctaatcgggcctccggggtccctgacaggttcagtggcagtgggtcaggcacagattttacactgaaaatcagcagagtggaggctgaggatgttggggtttattactgcatgcaagctctacaaactcctcggacgttcggccaagggaccaaggtggaaatcaaac

SEQ ID NO: 3345 - protein, 112 aa, Artificial Sequence
  Description of Artificial Sequence: Synthetic polypeptide
  MOD_RES (14)..(14): Any amino acid
DIVMTQSPLSLPVXPGEPASISCRSSQSLLHRIGYNYLDWYLQKPGQSPQLLIYLGSNRASGVPDRFSGSGSGTDFTLKISRVEAEDVGVYYCMQALQTPRTFGQGTKVEIK

SEQ ID NO: 3346 - protein, 9 aa, Artificial Sequence
  Description of Artificial Sequence: Synthetic peptide
MQALQTPRT

SEQ ID NO: 3347 - DNA, 370 bp, Artificial Sequence
  Description of Artificial Sequence: Synthetic polynucleotide
gaggtgcagctggtggagtctgggggaggcttggtacagcctggggggtccctgagactctcgtgtgcagcctctggattcaccttcagtacttatagcatgaactgggtccgccaggctccagggaaggggctggagtgggtttcatacattagtagtggaagtacttccatatactacgcagactctgtgacgggccgattcaccatctccagagacgatgccaggaactcagtgtatctgcaaatgaacagcctgagagacgaggacacggctgtctattactgtgcgaaagagagatgtggtggtggtagctgttactccgtctttgactcctggggccagggaaccctggtcaccgtctcctcag

SEQ ID NO: 3348 - protein, 123 aa, Artificial Sequence
  Description of Artificial Sequence: Synthetic polypeptide
EVQLVESGGGLVQPGGSLRLSCAASGFTFSTYSMNWVRQAPGKGLEWVSYISSGSTSIYYADSVTGRFTISRDDARNSVYLQMNSLRDEDTAVYYCAKERCGGGSCYSVFDSWGQGTLVTVSS

SEQ ID NO: 3349 - protein, 16 aa, Artificial Sequence
  Description of Artificial Sequence: Synthetic peptide
AKERCGGGSCYSVFDS

SEQ ID NO: 3350 - DNA, 325 bp, Artificial Sequence
  Description of Artificial Sequence: Synthetic polynucleotide
gacatccagatgacccagtctccttccaccctgtctgcatctgtaggagacagagtcaccatcacttgccgggccagtcagactattagtagttggttggcctggtatcagcagaaaccagggaaagcccctaagctcctgatctatagggcgtctactttagaaactggggtcccatcaaggttcagcggcagtggatctgggacagctttcactctcaccatcagcagcctgcaccctgatgatttcgcaacttattactgccaacaatataatactttttcaaggctcactttcggcggagggaccaaggtggagatcaaac

SEQ ID NO: 3351 - protein, 108 aa, Artificial Sequence
  Description of Artificial Sequence: Synthetic polypeptide
DIQMTQSPSTLSASVGDRVTITCRASQTISSWLAWYQQKPGKAPKLLIYRASTLETGVPSRFSGSGSGTAFTLTISSLHPDDFATYYCQQYNTFSRLTFGGGTKVEIK

SEQ ID NO: 3352 - protein, 10 aa, Artificial Sequence
  Description of Artificial Sequence: Synthetic peptide
QQYNTFSRLT

SEQ ID NO: 3353 - DNA, 353 bp, Artificial Sequence
  Description of Artificial Sequence: Synthetic polynucleotide
caggtgcagctggtgcagtctggggcagaggtgaagaagcctgggtcctcggtgaaggtctcctgcaaggcttctggagtcagcttcagcaactatgctatcaactgggtgcgacaggcccctggacaaggacttgagtggatgggagggatcatccctgtctttggttcagcaaactacgcacagaagttccagggcagagtcacgattaccgcggacgagcgcaggagcacagcctacatggaactgaggagcctgcgatctgaggacacggccatatattattgtgcgagagagagcggggttggtggtgatcttttctggggcccgggaagcctggtcaccgtctcctc

SEQ ID NO: 3354 - protein, 117 aa, Artificial Sequence
  Description of Artificial Sequence: Synthetic polypeptide
QVQLVQSGAEVKKPGSSVKVSCKASGVSFSNYAINWVRQAPGQGLEWMGGIIPVFGSANYAQKFQGRVTITADERRSTAYMELRSLRSEDTAIYYCARESGVGGDLFWGPGSLVTVS

SEQ ID NO: 3355 - protein, 11 aa, Artificial Sequence
  Description of Artificial Sequence: Synthetic peptide
ARESGVGGDLF

SEQ ID NO: 3356 - DNA, 337 bp, Artificial Sequence
  Description of Artificial Sequence: Synthetic polynucleotide
  modified_base (41)..(41): a, c, t, g, unknown or other
gatattgtgatgactcagtctccactctccctgcccgtcanccctggagaaccggcctccatctcctgcaggtctagtcagagcctcttggatagtaatggattcaactacttggattggtacctgcagaagccagggcagtctccacaggtcctgatctatttgggttctactcgggcttccggggtccctgacaggttcagtggcagtggatcaggcacagattttacactgaaaatcagcagagtggaggctgaggatgttggcgtttattactgcatgcaagctcgacaaacccctctcactttcggcggagggaccaaggtggagatcaaac

SEQ ID NO: 3357 - protein, 112 aa, Artificial Sequence
  Description of Artificial Sequence: Synthetic polypeptide
  MOD_RES (14)..(14): Any amino acid
DIVMTQSPLSLPVXPGEPASISCRSSQSLLDSNGFNYLDWYLQKPGQSPQVLIYLGSTRASGVPDRFSGSGSGTDFTLKISRVEAEDVGVYYCMQARQTPLTFGGGTKVEIK

SEQ ID NO: 3358 - protein, 9 aa, Artificial Sequence
  Description of Artificial Sequence: Synthetic peptide
MQARQTPLT

SEQ ID NO: 3359 - DNA, 358 bp, Artificial Sequence
  Description of Artificial Sequence: Synthetic polynucleotide
caggtgcagctggtgcagtctggggctgagttgaagaagcctgggtcctcggtgaaggtctcctgcaaggcttctggatacaccttcaacaactttgctatcgattgggtgcgacaggcccctggacaagggcttgagtggatgggaggcatcatccctgtctttggtacaccaaccttcgcacagaagttccacggcagagtcacgatcaccgcggacaaagtcacgagcacagtctacatggagttgcccagcctgagatttgaggacacggccgtttattactgtgcgagagaagggggggggagcccggcgcttgactactggggccagggaaccctggtcaccgtctcctcag

SEQ ID NO: 3360 - protein, 119 aa, Artificial Sequence
  Description of Artificial Sequence: Synthetic polypeptide
QVQLVQSGAELKKPGSSVKVSCKASGYTFNNFAIDWVRQAPGQGLEWMGGIIPVFGTPTFAQKFHGRVTITADKVTSTVYMELPSLRFEDTAVYYCAREGGGSPALDYWGQGTLVTVSS

SEQ ID NO: 3361 - protein, 12 aa, Artificial Sequence
  Description of Artificial Sequence: Synthetic peptide
AREGGGSPALDY

SEQ ID NO: 3362 - DNA, 335 bp, Artificial Sequence
  Description of Artificial Sequence: Synthetic polynucleotide
gatattgtgatgactcagtctccactctccctgcccgtcacccctggagagccggcctccatctcctgcaggtctagtcagagcctcctgcatcgtgatgggaacaactatttggattggtacctgcagaagccagggcagtctccacagctcctgatctatttgggttctaatcgggcctccggggtccctgacaggttcagtggcagtggatcaggcacagattttacactgaaaatcagcagagtggaggctgaggatgttggggtttattactgcatgcaagctatacaaactcctcgcacgttcggcccagggaccaaggtggaaatcaa

SEQ ID NO: 3363 - protein, 111 aa, Artificial Sequence
  Description of Artificial Sequence: Synthetic polypeptide
DIVMTQSPLSLPVTPGEPASISCRSSQSLLHRDGNNYLDWYLQKPGQSPQLLIYLGSNRASGVPDRFSGSGSGTDFTLKISRVEAEDVGVYYCMQAIQTPRTFGPGTKVEI

SEQ ID NO: 3364 - protein, 9 aa, Artificial Sequence
  Description of Artificial Sequence: Synthetic peptide
MQAIQTPRT

SEQ ID NO: 3365 - DNA, 353 bp, Artificial Sequence
  Description of Artificial Sequence: Synthetic polynucleotide
caggtgcagctggtgcagtctggggctgaggtgaagaggcctgggtcctcggtgaaagtctcctgcaaggcctctggaggcagcttcagcaactttgctatcaactgggtgcggcaggcccctggacaaggccttgagtggatgggagggatcatccctgtctttggtacaccaaactacgcacagaagttccagggcagagtcacgattaccgcggacgagtccacgggcacagcttatatggaagtgagaagtctgcaatctcaggacacggccgtgtattattgtgcgagagatggaggtggtgtgcctgctgaggactactggggccagggaaccctggtcaccgtctc

SEQ ID NO: 3366 - protein, 117 aa, Artificial Sequence
  Description of Artificial Sequence: Synthetic polypeptide
QVQLVQSGAEVKRPGSSVKVSCKASGGSFSNFAINWVRQAPGQGLEWMGGIIPVFGTPNYAQKFQGRVTITADESTGTAYMEVRSLQSQDTAVYYCARDGGGVPAEDYWGQGTLVTV

SEQ ID NO: 3367 - protein, 12 aa, Artificial Sequence
  Description of Artificial Sequence: Synthetic peptide
ARDGGGVPAEDY

SEQ ID NO: 3368 - DNA, 322 bp, Artificial Sequence
  Description of Artificial Sequence: Synthetic polynucleotide
gacatccagatgacccagtctccatcctccctgtctgcatctgtaggagacagagtcaccatcacttgccgggcaagtcagagcattagcagttatttaaattggtatcagcagaaaccagggaaagcccctaagctcctgatctatgttgcatccaatttgcaaactggggtcccatctaggttcagtggcagtggatctgggacagatttcactctcaccatcaccaatctgcaacctgaagattttgcaacttactactgtcaacagagttacagaacccctcggaccttcggccaagggacacgactggagattaaac

SEQ ID NO: 3369 - protein, 107 aa, Artificial Sequence
  Description of Artificial Sequence: Synthetic polypeptide
DIQMTQSPSSLSASVGDRVTITCRASQSISSYLNWYQQKPGKAPKLLIYVASNLQTGVPSRFSGSGSGTDFTLTITNLQPEDFATYYCQQSYRTPRTFGQGTRLEIK

SEQ ID NO: 3370 - protein, 9 aa, Artificial Sequence
  Description of Artificial Sequence: Synthetic peptide
QQSYRTPRT

SEQ ID NO: 3371 - DNA, 358 bp, Artificial Sequence
  Description of Artificial Sequence: Synthetic polynucleotide
caggtgcagctggtgcagtctggggctgaggtgaagaagcctgggtcctcggtgaaactttcctgtaaggcttctggaggcactggaggcgccttcggcaactatggtttccactgggtgcgacacgcccctggacaagggcttgagtggatgggaggcataatccctgtctttggttcagcaaagttcgcacagaagttccagggcagaatcacgattaccgcggacgaatccacgaccacagtctacatgcacctgcgcggcctgagacatgaggacacggccgtgtatttctgtgcgagacagagttatgccgttgactactggggccagggaaccctggtcatcgtctcctcag

SEQ ID NO: 3372 - protein, 119 aa, Artificial Sequence
  Description of Artificial Sequence: Synthetic polypeptide
QVQLVQSGAEVKKPGSSVKLSCKASGGTGGAFGNYGFHWVRHAPGQGLEWMGGIIPVFGSAKFAQKFQGRITITADESTTTVYMHLRGLRHEDTAVYFCARQSYAVDYWGQGTLVIVSS

SEQ ID NO: 3373 - protein, 9 aa, Artificial Sequence
  Description of Artificial Sequence: Synthetic peptide
ARQSYAVDY

SEQ ID NO: 3374 - DNA, 322 bp, Artificial Sequence
  Description of Artificial Sequence: Synthetic polynucleotide
gacatccagatgacccagtctccatcctccctgtctgcatctataggagacacagtcaccatcacttgccaggcgagtcacggcataaacaacaatttgaattggtttcagcagaaaccagggaaagcccctcagctcctgatctacgatgcatccaatttggagacaggggtcccatctaggttcagtggaagtggatttgggacagagtttactttcaccatcagcagcctgcagcctgaagatattgcaacctattactgtcaacagtatgatagtctcacgtggacgttcggccaagggaccagggtggaaatcaaac

SEQ ID NO: 3375 - protein, 107 aa, Artificial Sequence
  Description of Artificial Sequence: Synthetic polypeptide
DIQMTQSPSSLSASIGDTVTITCQASHGINNNLNWFQQKPGKAPQLLIYDASNLETGVPSRFSGSGFGTEFTFTISSLQPEDIATYYCQQYDSLTWTFGQGTRVEIK

SEQ ID NO: 3376 - protein, 9 aa, Artificial Sequence
  Description of Artificial Sequence: Synthetic peptide
QQYDSLTWT

SEQ ID NO: 3377 - DNA, 379 bp, Artificial Sequence
  Description of Artificial Sequence: Synthetic polynucleotide
caggtgcagctggtgcagtctggggctgaggtgaagaagcctgggtcgtcggtgaaggtctcctgcaaggcttctggaggcaccttcagtagccaggctatcacctgggtgcgacaggcccctggacaagggcttgagtggatgggagtgttcatccctatcttcggtacagcaaactacgcacagaagttccagggcagagtcacaattaccgcggacgaatccacgagcacagcctatatggagctgaacagcctgagatctgaggacacggccgtgtattactgtacgagagaaggtggtggatacgtctctggttatgggggtggatcctactttgactactggggccagggaaccctggtcaccgtctcctcag

SEQ ID NO: 3378 - protein, 126 aa, Artificial Sequence
  Description of Artificial Sequence: Synthetic polypeptide
QVQLVQSGAEVKKPGSSVKVSCKASGGTFSSQAITWVRQAPGQGLEWMGVFIPIFGTANYAQKFQGRVTITADESTSTAYMELNSLRSEDTAVYYCTREGGGYVSGYGGGSYFDYWGQGTLVTVSS

SEQ ID NO: 3379 - protein, 19 aa, Artificial Sequence
  Description of Artificial Sequence: Synthetic peptide
TREGGGYVSGYGGGSYFDY

SEQ ID NO: 3380 - DNA, 334 bp, Artificial Sequence
  Description of Artificial Sequence: Synthetic polynucleotide
gacatcgtgatgacccagtctccagactccctggctgtgtctctgggcgagagggccaccatcaactgcaagtccagccagagtgttttgtacagcaataagaactacttagcttggtaccaggtcaaaccaggacagcctcctaggctgctcatttactgggcatctacccgggaatccggggtccctgaccgattcagtggcagcgggtctgggacagatttcactctcaccatcagcagcctgcaggctgaagatgtggcagtttattactgtcagcaatattataatactcccgtcaccttcggccaagggacacgactggagattaaac

SEQ ID NO: 3381 - protein, 111 aa, Artificial Sequence
  Description of Artificial Sequence: Synthetic polypeptide
DIVMTQSPDSLAVSLGERATINCKSSQSVLYSNKNYLAWYQVKPGQPPRLLIYWASTRESGVPDRFSGSGSGTDFTLTISSLQAEDVAVYYCQQYYNTPVTFGQGTRLEIK

SEQ ID NO: 3382 - protein, 9 aa, Artificial Sequence
  Description of Artificial Sequence: Synthetic peptide
QQYYNTPVT

SEQ ID NO: 3383 - DNA, 358 bp, Artificial Sequence
  Description of Artificial Sequence: Synthetic polynucleotide
gaggtgcagctggtggagtctgggggaggcctgatacagcctgggaagtccctgagactcacctgtgcaggctctggattcagtttcactacccatagtatgagctgggtccgccaggctccagggaaggggctggaatggattgcctatatgagtagtagtgtcacgtactacgcagactctgtgaagggccgattcaccgtctccagagacattggcaagagttcactgtatctgcaaatgaacagcctgagagacgaggacacggctgtctattactgtgcgagaggaatctacggtgactatccctactactttgactactggggccagggaaccctggtcatcgtctcctcag

SEQ ID NO: 3384 - protein, 119 aa, Artificial Sequence
  Description of Artificial Sequence: Synthetic polypeptide
EVQLVESGGGLIQPGKSLRLTCAGSGFSFTTHSMSWVRQAPGKGLEWIAYMSSSVTYYADSVKGRFTVSRDIGKSSLYLQMNSLRDEDTAVYYCARGIYGDYPYYFDYWGQGTLVIVSS

SEQ ID NO: 3385 - protein, 14 aa, Artificial Sequence
  Description of Artificial Sequence: Synthetic peptide
ARGIYGDYPYYFDY

SEQ ID NO: 3386 - DNA, 337 bp, Artificial Sequence
  Description of Artificial Sequence: Synthetic polynucleotide
gacatcgtgatgacccagtctccagactccctggctgtgtctctgggcgagagggccaccctctactgcaagtccagccagagtctattatacggctccaacaataacaagtacttagcttggtaccagcaaaaaccaggacagcctcctaaggtgctcatttactgggcatctatccgggcatcgggggtccctgaccgattcagtggcagcgggtctgagacagatttcagtctcaccatcagcagcctgcaggctgaagatgtggcagtttattactgtctgcaatattatagcacttggacgttcggccaagggaccaaggtggaaatcaaac

SEQ ID NO: 3387 - protein, 112 aa, Artificial Sequence
  Description of Artificial Sequence: Synthetic polypeptide
DIVMTQSPDSLAVSLGERATLYCKSSQSLLYGSNNNKYLAWYQQKPGQPPKVLIYWASIRASGVPDRFSGSGSETDFSLTISSLQAEDVAVYYCLQYYSTWTFGQGTKVEIK

SEQ ID NO: 3388 - protein, 8 aa, Artificial Sequence
  Description of Artificial Sequence: Synthetic peptide
LQYYSTWT

SEQ ID NO: 3389 - DNA, 364 bp, Artificial Sequence
  Description of Artificial Sequence: Synthetic polynucleotide
caggtgcagctggtgcagtctggggctgaggtgaagaagcctggggcctcagtgaaggtttcctgcaagacatctggatacatcttcaccacccactatatgcactgggtgcgacaggcccctggacaagggcttgagtggatgggattgatcaaccctactggtggtggcacaaggttgccacagaggttccaggacagattcagcatgaccgctgacacgtccacgagcacagtctacatggaattgagcagcctgacatctgaggacacggccgtttattactgtgctaggggaaaatgggaactaggagagagtagttttgacatctggggccaagggacaatggtcaccgtctcttcag

SEQ ID NO: 3390 - protein, 121 aa, Artificial Sequence
  Description of Artificial Sequence: Synthetic polypeptide
QVQLVQSGAEVKKPGASVKVSCKTSGYIFTTHYMHWVRQAPGQGLEWMGLINPTGGGTRLPQRFQDRFSMTADTSTSTVYMELSSLTSEDTAVYYCARGKWELGESSFDIWGQGTMVTVSS

SEQ ID NO: 3391 - protein, 14 aa, Artificial Sequence
  Description of Artificial Sequence: Synthetic peptide
ARGKWELGESSFDI

SEQ ID NO: 3392 - DNA, 322 bp, Artificial Sequence
  Description of Artificial Sequence: Synthetic polynucleotide
gacatccagatgacccagtctccatcctccctgtctgcatctgcaggagacagagtcaccatcacttgccaggcgagtcaggacattagacaccatttaaattggtatcagcagaaaccagggaaagcccctaacctcctgatctacgatgcatccgctttggaaacaggggtcccatcaaggttcagtggaagtggatctgggacaggttttactctcaccatcagcagcctgcagcctgaagattttgcaacatattactgtcaacagtatcatgatctcccgctcactttcggcggcgggaccaaggtggagatcaaac

SEQ ID NO: 3393 - protein, 107 aa, Artificial Sequence
  Description of Artificial Sequence: Synthetic polypeptide
DIQMTQSPSSLSASAGDRVTITCQASQDIRHHLNWYQQKPGKAPNLLIYDASALETGVPSRFSGSGSGTGFTLTISSLQPEDFATYYCQQYHDLPLTFGGGTKVEIK

SEQ ID NO: 3394 - protein, 9 aa, Artificial Sequence
  Description of Artificial Sequence: Synthetic peptide
QQYHDLPLT

SEQ ID NO: 3395 - DNA, 355 bp, Artificial Sequence
  Description of Artificial Sequence: Synthetic polynucleotide
caggtgcagctggtgcagtctggggctgaggtgaagaagcctgggtcctcggtgaaggtctcctgcaaggcttttggagtccccttcagcaactatgctatccactgggtgcgacaggcccctggacaagggcttgagtggatggggaggatcatccctgtctttggtacaccaaactacgcacaccagttccagggcagagtctccattaccgcggacgcgtcgacgagcacagcctacatggaggtgggccgcctgagatctgaagacacggccgtctattattgtgcgagagagagcggggttggtggtgatcttttgtggggccagggaaccctggtcaccgtctcctcag

SEQ ID NO: 3396 - protein, 118 aa, Artificial Sequence
  Description of Artificial Sequence: Synthetic polypeptide
QVQLVQSGAEVKKPGSSVKVSCKAFGVPFSNYAIHWVRQAPGQGLEWMGRIIPVFGTPNYAHQFQGRVSITADASTSTAYMEVGRLRSEDTAVYYCARESGVGGDLLWGQGTLVTVSS

SEQ ID NO: 3397 - protein, 11 aa, Artificial Sequence
  Description of Artificial Sequence: Synthetic peptide
ARESGVGGDLL

SEQ ID NO: 3398 - DNA, 337 bp, Artificial Sequence
  Description of Artificial Sequence: Synthetic polynucleotide
gatattgtgatgactcagtctccactctccctgcccgtcacccctggagagccggcctccatctcctgcaggtctagtcagagcctcctgagtagtaatggattccactatttggattggtacgtgcagaagccagggcagtctccacaggtcctgatctatatgggttctaatcgggcctccggggtccctgagaggatcagtggcagtggatcaggcacagattttacactgaaaatcagcagagtggaggctgaggatgttggggtttattactgcatgcaagctctacaaactcctctcactttcggcggagggaccaaggtggagatcaaac

SEQ ID NO: 3399 - protein, 112 aa, Artificial Sequence
  Description of Artificial Sequence: Synthetic polypeptide
DIVMTQSPLSLPVTPGEPASISCRSSQSLLSSNGFHYLDWYVQKPGQSPQVLIYMGSNRASGVPERISGSGSGTDFTLKISRVEAEDVGVYYCMQALQTPLTFGGGTKVEIK

SEQ ID NO: 3400 - protein, 9 aa, Artificial Sequence
  Description of Artificial Sequence: Synthetic peptide
MQALQTPLT

SEQ ID NO: 3401 - DNA, 352 bp, Artificial Sequence
  Description of Artificial Sequence: Synthetic polynucleotide
caggtgcagctggtgcagtctggggctgacgtgaagaagcctgggtcctcggtgaaggtctcctgcaaggcttctggaggcacgttcagcacctctaccatcagctgggtgcgacaggcccctggacaagggcttgagtggatgggagggatcatccctatttttggtacagcaaactacgctcagaagttccagggcagagtcacaattaccgcggacgaatccacgagcacagcctacatggatctgagcggcctgagatctgaggacacggccgtctattactgtgcgagtgggacctacgtcctccttgactactggggccagggaaccctggtcaccgtctcctcag

SEQ ID NO: 3402 - protein, 117 aa, Artificial Sequence
  Description of Artificial Sequence: Synthetic polypeptide
QVQLVQSGADVKKPGSSVKVSCKASGGTFSTSTISWVRQAPGQGLEWMGGIIPIFGTANYAQKFQGRVTITADESTSTAYMDLSGLRSEDTAVYYCASGTYVLLDYWGQGTLVTVSS

SEQ ID NO: 3403 - protein, 10 aa, Artificial Sequence
  Description of Artificial Sequence: Synthetic peptide
ASGTYVLLDY

SEQ ID NO: 3404 - DNA, 325 bp, Artificial Sequence
  Description of Artificial Sequence: Synthetic polynucleotide
gaaattgtgttgacgcagtctccagtctccctgtctttgtctccaggggaaagagccaccctctcctgcagggccagtcagagtgttagcagcgactacttaacctggtaccaacagaaacctggccaggctcccaggctcctcatctatggtgcatccagcagggccactggcatcccagacaggttcagtggcagtgcgtctgggacagacttcactctcaccatcagcagactggagcctgaagattttgcagtgtattactgtcatcagtatggtagctcaccgtacacttttggccaggggaccaagctggagatcaaac

SEQ ID NO: 3405 - protein, 108 aa, Artificial Sequence
  Description of Artificial Sequence: Synthetic polypeptide
EIVLTQSPVSLSLSPGERATLSCRASQSVSSDYLTWYQQKPGQAPRLLIYGASSRATGIPDRFSGSASGTDFTLTISRLEPEDFAVYYCHQYGSSPYTFGQGTKLEIK

SEQ ID NO: 3406 - protein, 9 aa, Artificial Sequence
  Description of Artificial Sequence: Synthetic peptide
HQYGSSPYT

SEQ ID NO: 3407 - DNA, 355 bp, Artificial Sequence
  Description of Artificial Sequence: Synthetic polynucleotide
caggtgcagctggtgcagtctggggctgaggtgaagaagcctgggtcctcggtgaaggtctcctgcaaggctactggaggcagcttcgccaactatgcgatcagctgggtgcgacaggacgctggacaagggcttgagtggatgggacagatcatccctgtctttcgtacggcaacgtacgcacagaggttccagggcagagtcacgattaccgcggacgaatccacgagcacagcctacatggagctgagcagcctgagatctgaggacacggccgtttatttctgtgcgagagatagtggtgtggtggttatggacaactggggccagggaaccgtggtcaccgtctcctcag

SEQ ID NO: 3408 - protein, 118 aa, Artificial Sequence
  Description of Artificial Sequence: Synthetic polypeptide
QVQLVQSGAEVKKPGSSVKVSCKATGGSFANYAISWVRQDAGQGLEWMGQIIPVFRTATYAQRFQGRVTITADESTSTAYMELSSLRSEDTAVYFCARDSGVVVMDNWGQGTVVTVSS

SEQ ID NO: 3409 - protein, 11 aa, Artificial Sequence
  Description of Artificial Sequence: Synthetic peptide
ARDSGVVVMDN

SEQ ID NO: 3410 - DNA, 337 bp, Artificial Sequence
  Description of Artificial Sequence: Synthetic polynucleotide
gatattgtgatgactcagtctccactctccctgcccgtcacccctggagagccggcctccatctcctgcaggtctagtcagagcctcctacatagggatggatacaactatttgagttggtacctgcagaagccagggcagtctccacagctcctgatctatttgggttctaatcgggcctccggggtccctgacaggttcagtggcagtggatcaggcacagattttacactgaaaatcagcagagtggagtctgaggatgttggggtttattactgcatggaagctctacaaacccccctcactttcggcggagggaccaaggtggagatcaaac

SEQ ID NO: 3411 - protein, 112 aa, Artificial Sequence
  Description of Artificial Sequence: Synthetic polypeptide
DIVMTQSPLSLPVTPGEPASISCRSSQSLLHRDGYNYLSWYLQKPGQSPQLLIYLGSNRASGVPDRFSGSGSGTDFTLKISRVESEDVGVYYCMEALQTPLTFGGGTKVEIK

SEQ ID NO: 3412 - protein, 9 aa, Artificial Sequence
  Description of Artificial Sequence: Synthetic peptide
MEALQTPLT

SEQ ID NO: 3413 - DNA, 355 bp, Artificial Sequence
  Description of Artificial Sequence: Synthetic polynucleotide
caggtgcagctggtgcagtctggggctgaggtgaagaagcctgggtcctcggtgaaggtctcctgcaaggcttctggaggcaccttcagcaactatgctatcaactgggtgcgacaggcccctggacaagggcttgagtggatgggagggatcatccctatctttggtacaacaaactacgcacagaagttccagggcagagtcacgattaccgcggacgaatccacgagcacagcctacatggaactgagcagcctgagatttgaggacacggccgtgtattactgtgcgagagcaatgggatctactgggggagactactggggccagggaaccctggtcaccgtctcctcag

SEQ ID NO: 3414 - protein, 118 aa, Artificial Sequence
  Description of Artificial Sequence: Synthetic polypeptide
QVQLVQSGAEVKKPGSSVKVSCKASGGTFSNYAINWVRQAPGQGLEWMGGIIPIFGTTNYAQKFQGRVTITADESTSTAYMELSSLRFEDTAVYYCARAMGSTGGDYWGQGTLVTVSS

SEQ ID NO: 3415 - protein, 11 aa, Artificial Sequence
  Description of Artificial Sequence: Synthetic peptide
ARAMGSTGGDY

SEQ ID NO: 3416 - DNA, 325 bp, Artificial Sequence
  Description of Artificial Sequence: Synthetic polynucleotide
gacatccagatgacccagtctccatcctccctgtctgcatctgtaggagacagagtcaccatcacttgccaggcgagtcaggacattagcaactatttaaattggtatcagcagaaaccagggaaagcccctaagctcctgatctacgatgcatccaatttggaaacaggggtcccatcaaggttcagtggaagtggatctgggacagattttactttcaccatcagcggcctgcagcctgaagatattgcaacatattactgtcagcaatatgattatctccctcggttcactttcggccctgggaccaaagtggatatcaaac

SEQ ID NO: 3417 - protein, 108 aa, Artificial Sequence
  Description of Artificial Sequence: Synthetic polypeptide
DIQMTQSPSSLSASVGDRVTITCQASQDISNYLNWYQQKPGKAPKLLIYDASNLETGVPSRFSGSGSGTDFTFTISGLQPEDIATYYCQQYDYLPRFTFGPGTKVDIK

SEQ ID NO: 3418 - protein, 10 aa, Artificial Sequence
  Description of Artificial Sequence: Synthetic peptide
QQYDYLPRFT

SEQ ID NO: 3419 - DNA, 352 bp, Artificial Sequence
  Description of Artificial Sequence: Synthetic polynucleotide
caggtgcagctggtgcagtctggggctgaggtgaagaagcctgggtcctcggtgaaggtctcctgcaaggcttctggaggcagcctcagcaactatgccatcacctgggtgcgacaggcccctggacaagggcttgagtggatgggaggggtcatccctgtctttgggacaccaagatacgcgcagaggttccagggcagggtcacgattaccgcggacgaaaccacaaatacagcctacatggaactgaggaggctgacatatgaggacacggccgtctacttctgtgcgagaggtggatatagcgtctccgactactggggccagggaaccctggtcaccgtctcctcag

SEQ ID NO: 3420 - protein, 117 aa, Artificial Sequence
  Description of Artificial Sequence: Synthetic polypeptide
QVQLVQSGAEVKKPGSSVKVSCKASGGSLSNYAITWVRQAPGQGLEWMGGVIPVFGTPRYAQRFQGRVTITADETTNTAYMELRRLTYEDTAVYFCARGGYSVSDYWGQGTLVTVSS

SEQ ID NO: 3421 - protein, 10 aa, Artificial Sequence
  Description of Artificial Sequence: Synthetic peptide
ARGGYSVSDY

SEQ ID NO: 3422 - DNA, 322 bp, Artificial Sequence
  Description of Artificial Sequence: Synthetic polynucleotide
gacatccagatgacccagtctccatcctccctgtctgcatctgtaggagacagcgtcaccatcacttgccaggcgagtcaggacattggcaagtatttaaattggtatcagcagaaaccagggaaagcccctaagctcctgatctacgatgcatccaatttggaaacagggatcccatcaaggttcagtggaagtggatctgggacacattttactttctccatcagcagcctgcagcctgaagatattgcaacatattactgtcaacaatttgataatctccgctacacttttggccaggggaccaagttgcagatcaaac

SEQ ID NO: 3423 - protein, 107 aa, Artificial Sequence
  Description of Artificial Sequence: Synthetic polypeptide
DIQMTQSPSSLSASVGDSVTITCQASQDIGKYLNWYQQKPGKAPKLLIYDASNLETGIPSRFSGSGSGTHFTFSISSLQPEDIATYYCQQFDNLRYTFGQGTKLQIK

SEQ ID NO: 3424 - protein, 9 aa, Artificial Sequence
  Description of Artificial Sequence: Synthetic peptide
QQFDNLRYT

SEQ ID NO: 3425 - DNA, 355 bp, Artificial Sequence
  Description of Artificial Sequence: Synthetic polynucleotide
caggtccagctggtgcagtctggggctgaggtgaggaagcctgggtcctcggtgaaggtctcctgcgaggcttctggaggcaccttcagcaactatgctatcagctgggtgcgacaggcccctggacaagggcttgagtggatgggagggatcatccctatctttggtacagcaaactacgcacagaagttccagggcagagtcacgattaccgcggacgaatccacgagcacagcctatatagaactgagcagcctaagatctggggacacggccgtatattactgtgcgagagatgatggttcggggagttttgcctactggggccagggaaccctggtcaccgtctcctcag

SEQ ID NO: 3426 - protein, 118 aa, Artificial Sequence
  Description of Artificial Sequence: Synthetic polypeptide
QVQLVQSGAEVRKPGSSVKVSCEASGGTFSNYAISWVRQAPGQGLEWMGGIIPIFGTANYAQKFQGRVTITADESTSTAYIELSSLRSGDTAVYYCARDDGSGSFAYWGQGTLVTVSS

SEQ ID NO: 3427 - protein, 11 aa, Artificial Sequence
  Description of Artificial Sequence: Synthetic peptide
ARDDGSGSFAY

SEQ ID NO: 3428 - DNA, 337 bp, Artificial Sequence
  Description of Artificial Sequence: Synthetic polynucleotide
gatattgtgatgactcagtctccactctccctgcccgtcacccctggagagccggcctccatctcctgcaggtctagtcagagcctcctgcatagtattgggtacaactatttggattggtacctgcagaagccagggcagtctccacagctcctgatctatttgggttctaatcgggcctccggggtccctgacaggttcagtggcagtggatcaggcacagattttacactgaaaatcagcagagtggaggctgaggatgttggggtttattactgcatgcaagctctacaaactcctcggacttttggccaggggaccaagctggagatcaaac

SEQ ID NO: 3429 - protein, 112 aa, Artificial Sequence
  Description of Artificial Sequence: Synthetic polypeptide
DIVMTQSPLSLPVTPGEPASISCRSSQSLLHSIGYNYLDWYLQKPGQSPQLLIYLGSNRASGVPDRFSGSGSGTDFTLKISRVEAEDVGVYYCMQALQTPRTFGQGTKLEIK

SEQ ID NO: 3430 - protein, 9 aa, Artificial Sequence
  Description of Artificial Sequence: Synthetic peptide
MQALQTPRT

SEQ ID NO: 3431 - DNA, 358 bp, Artificial Sequence
  Description of Artificial Sequence: Synthetic polynucleotide
caggtgcagctggtgcagtctggggctgaggtgaagaagcctgggtcctcggtgaaggtctcctgcaagtcttctggaggcaccttcagcaactatgctatcaactgggtccgacaggcccctggacaggggcttgagtggatgggagggatcatccctctctttggtacaccaaactacgcacagaggttccagggcagactcacaattaccgcggacgaatccacgagcacagcctacatggaactgagcagtctgagatctgaggactcggccatctattactgtgcgagagatcaaggggccccccccgcatttgcctactggggccagggaaccctggtcatcgtctcctcag

SEQ ID NO: 3432 - protein, 119 aa, Artificial Sequence
  Description of Artificial Sequence: Synthetic polypeptide
QVQLVQSGAEVKKPGSSVKVSCKSSGGTFSNYAINWVRQAPGQGLEWMGGIIPLFGTPNYAQRFQGRLTITADESTSTAYMELSSLRSEDSAIYYCARDQGAPPAFAYWGQGTLVIVSS

SEQ ID NO: 3433 - protein, 12 aa, Artificial Sequence
  Description of Artificial Sequence: Synthetic peptide
ARDQGAPPAFAY

SEQ ID NO: 3434 - DNA, 322 bp, Artificial Sequence
  Description of Artificial Sequence: Synthetic polynucleotide
gacatccagatgacccagtctccatcctccctgtctgcatctgtaggggacagagtcagcatctcttgccgggcaagtcagagcattaacagctatttaaattggtatcagcagaaaccagggaaagcccctaagctcctgatctacgctgtgtccagtttggaaaatggggtcccatcaaggttcagtggcagtggatctgggacagatttcactctcaccatcagcagtctgcaacccgaagattttgcaacttactactgtcaacagaattacattatcccgtacacttttggccaggggaccaacctggagatcaaac

SEQ ID NO: 3435 - protein, 107 aa, Artificial Sequence
  Description of Artificial Sequence: Synthetic polypeptide
DIQMTQSPSSLSASVGDRVSISCRASQSINSYLNWYQQKPGKAPKLLIYAVSSLENGVPSRFSGSGSGTDFTLTISSLQPEDFATYYCQQNYIIPYTFGQGTNLEIK

SEQ ID NO: 3436 - protein, 9 aa, Artificial Sequence
  Description of Artificial Sequence: Synthetic peptide
QQNYIIPYT

SEQ ID NO: 3437 - DNA, 352 bp, Artificial Sequence
  Description of Artificial Sequence: Synthetic polynucleotide
caggtgcagctggtgcagtctggggctgaggtgaagaagcctgggtcctcggtgaaggtctcctgcaaggcttctggaggcaccttcagtaacaatgctatcaactgggtgcgacaggcccctggacaagggcttgagtggatgggagggatcatccctgtctttggtacagcaaactacgcacagaagtttcagggcagagtcaccattaccgcggacgagtccacgaccacatcctacatgacgctgagcagcctgagatctgacgacacggccgtgttttattgtgcttcgggcggctataacccctttaactactggggccagggaacgccggtcaccgtctcctcag

SEQ ID NO: 3438 - protein, 117 aa, Artificial Sequence
  Description of Artificial Sequence: Synthetic polypeptide
QVQLVQSGAEVKKPGSSVKVSCKASGGTFSNNAINWVRQAPGQGLEWMGGIIPVFGTANYAQKFQGRVTITADESTTTSYMTLSSLRSDDTAVFYCASGGYNPFNYWGQGTPVTVSS

SEQ ID NO: 3439 - protein, 10 aa, Artificial Sequence
  Description of Artificial Sequence: Synthetic peptide
ASGGYNPFNY

SEQ ID NO: 3440 - DNA, 322 bp, Artificial Sequence
  Description of Artificial Sequence: Synthetic polynucleotide
gacatccagatgacccagtctccatcctccctgtctgcatctgtaggagacagagtcaccatcacttgccaggcgagtcaggacattaggaattatttaaattggtatcagcagaaaccagggaaagcccctaaggtcctgatctatgatgcatccaatttggaaacaggggtcccatcaaggttcagtggaagtgcatctgggaccgattttactttcaccatcagcagcctgcagcctgaagatgctgcaacatattactgtcaacaatataataatcccccgaacacttttggccaggggaccaaggtggagatcaaac

SEQ ID NO: 3441 - protein, 107 aa, Artificial Sequence
  Description of Artificial Sequence: Synthetic polypeptide
DIQMTQSPSSLSASVGDRVTITCQASQDIRNYLNWYQQKPGKAPKVLIYDASNLETGVPSRFSGSASGTDFTFTISSLQPEDAATYYCQQYNNPPNTFGQGTKVEIK

SEQ ID NO: 3442 - protein, 9 aa, Artificial Sequence
  Description of Artificial Sequence: Synthetic peptide
QQYNNPPNT

SEQ ID NO: 3443 - DNA, 370 bp, Artificial Sequence
  Description of Artificial Sequence: Synthetic polynucleotide
gaggtgcagctgttggagtctgggggaggcgtagtacagcctggggggtccctgagactctcctgtgcagcctctggattcacctttagcaactatgccatgagctgggtccgccaggctccagggaaggggctggagtgggtctcaggtattactggtagtggaggtggcacatactacgccgactccgtgaagggccgattcaccatctccagagagaatggcaggaacacagtatatctggagatgaacagcgtgagagccgaggacacggccatatattactgtgcgaaggatcgaatcctcgggagcagcagctggtactcgtttgataagtggggccagggagcgctagtcagcgtctcctcag

SEQ ID NO: 3444 - protein, 123 aa, Artificial Sequence
  Description of Artificial Sequence: Synthetic polypeptide
EVQLLESGGGVVQPGGSLRLSCAASGFTFSNYAMSWVRQAPGKGLEWVSGITGSGGGTYYADSVKGRFTISRENGRNTVYLEMNSVRAEDTAIYYCAKDRILGSSSWYSFDKWGQGALVSVSS

SEQ ID NO: 3445 - protein, 16 aa, Artificial Sequence
  Description of Artificial Sequence: Synthetic peptide
AKDRILGSSSWYSFDK

SEQ ID NO: 3446 - DNA, 322 bp, Artificial Sequence
  Description of Artificial Sequence: Synthetic polynucleotide
gacatccagatgacccagtctccatcctccctgtctgcatctgtaggagacagagtcaccatcacgtgccaggcgagtcaggccattgccaacaatataaattggtatcagcagaaaccagggaaagcccctaagttcctgatctacgatgcgtccaatttggagacaggggtcccatccaggttcagtggaggtggatatgggacagattttactctcaccatcaccagcctgcagcctgacgattttgcaacatattactgccaacagcatgataatctacctctcactttcggcggagggaccaaggtggagatcaaac

SEQ ID NO: 3447 - protein, 107 aa, Artificial Sequence
  Description of Artificial Sequence: Synthetic polypeptide
DIQMTQSPSSLSASVGDRVTITCQASQAIANNINWYQQKPGKAPKFLIYDASNLETGVPSRFSGGGYGTDFTLTITSLQPDDFATYYCQQHDNLPLTFGGGTKVEIK

SEQ ID NO: 3448 - protein, 9 aa, Artificial Sequence
  Description of Artificial Sequence: Synthetic peptide
QQHDNLPLT

SEQ ID NO: 3449 - DNA, 355 bp, Artificial Sequence
  Description of Artificial Sequence: Synthetic polynucleotide
  modified_base (277)..(277): a, c, t, g, unknown or other
caggtgcagctggtgcagtctggggctgaggtgaagaagcctgggtcctcggtgaaggtctcctgcaaggcttctggaggaaccttcagcaactatgctatcaactgggtgcgacaggcccctggacaagggcttgagtggatgggagggatcatccctttgtttggtacaccgaagtacgcacagaagttccagggcagagtcacgattagcgcggacgattccacgagtacggcctacatggagatgagcagtctgagatctgaggacacggccntctattattgtgcgagagatggggggatggcttcccttgactattggggccagggaaccctggtcgccgtctcctcag

SEQ ID NO: 3450 - protein, 118 aa, Artificial Sequence
  Description of Artificial Sequence: Synthetic polypeptide
  MOD_RES (93)..(93): Any amino acid
QVQLVQSGAEVKKPGSSVKVSCKASGGTFSNYAINWVRQAPGQGLEWMGGIIPLFGTPKYAQKFQGRVTISADDSTSTAYMEMSSLRSEDTAXYYCARDGGMASLDYWGQGTLVAVSS

SEQ ID NO: 3451 - protein, 11 aa, Artificial Sequence
  Description of Artificial Sequence: Synthetic peptide
ARDGGMASLDY

SEQ ID NO: 3452 - DNA, 334 bp, Artificial Sequence
  Description of Artificial Sequence: Synthetic polynucleotide
gatattgtgatgactcagtctccactctccctggccgtcacccctggagagccggcctccatctcctgcaggtctagtgagagcctcctgcatcgtagtggatacacctatttggattggtacctgcagaagccagggcagcctccacaactcctgatctatttgggttctaatcgggcctccggggtccctgacaggttcagtggcagtggatcaggcacagattttacactgaaaatcagcagagtggaggctgaggatgttggggtttattactgcatgcaagctctacaaagtctttctttcggccctgggaccaaagtgcatatcaaac

SEQ ID NO: 3453 - protein, 111 aa, Artificial Sequence
  Description of Artificial Sequence: Synthetic polypeptide
DIVMTQSPLSLAVTPGEPASISCRSSESLLHRSGYTYLDWYLQKPGQPPQLLIYLGSNRASGVPDRFSGSGSGTDFTLKISRVEAEDVGVYYCMQALQSLSFGPGTKVHIK

SEQ ID NO: 3454 - protein, 8 aa, Artificial Sequence
  Description of Artificial Sequence: Synthetic peptide
MQALQSLS

SEQ ID NO: 3455 - DNA, 346 bp, Artificial Sequence
  Description of Artificial Sequence: Synthetic polynucleotide
caggtgcagctggtggagtctgggggaggcgtggtccagcctggaaagtccctcagactctcctgtgcagcctctggattcaccttcactcactatggaatgcactgggtccgccaggctccaggcaagggcctggagtgggtggcatttatttcatatgatggaaattatcaacattatggagactccgtgaagggccggttcaccatctccagagacaactccaggaacacggtgtatttgcagatgaacagtctgagaactgaggacacggctgtctattattgcctgagggggtcctggttcgacccctggggccagggaaccctggtcaccgtctcctcag

SEQ ID NO: 3456 - protein, 115 aa, Artificial Sequence
  Description of Artificial Sequence: Synthetic polypeptide
QVQLVESGGGVVQPGKSLRLSCAASGFTFTHYGMHWVRQAPGKGLEWVAFISYDGNYQHYGDSVKGRFTISRDNSRNTVYLQMNSLRTEDTAVYYCLRGSWFDPWGQGTLVTVSS

SEQ ID NO: 3457 - protein, 8 aa, Artificial Sequence
  Description of Artificial Sequence: Synthetic peptide
LRGSWFDP

SEQ ID NO: 3458 - DNA, 322 bp, Artificial Sequence
  Description of Artificial Sequence: Synthetic polynucleotide
  modified_base (22)..(22): a, c, t, g, unknown or other
gccatccagttgacccagtctncattctccctgtctgcatcttttggagagagggtcaccatccattgccgggcaagtcagggcattaacagtgctttagcctggtatcagcagaaaccagggacagctcctaagctcctgatctatgatgtttccaatttggaaagtggggtcccatcaaggttcagcggcagtggatctgggacagaattcactctcaccatcagcagcctgcaacctgaagattttgcagcttattactgtcaacagtttaatagttatccgctcactttcggcggggggaccaaggtggaaatcaaac

SEQ ID NO: 3459 - protein, 107 aa, Artificial Sequence
  Description of Artificial Sequence: Synthetic polypeptide
  MOD_RES (8)..(8): Any amino acid
AIQLTQSXFSLSASFGERVTIHCRASQGINSALAWYQQKPGTAPKLLIYDVSNLESGVPSRFSGSGSGTEFTLTISSLQPEDFAAYYCQQFNSYPLTFGGGTKVEIK

SEQ ID NO: 3460 - protein, 9 aa, Artificial Sequence
  Description of Artificial Sequence: Synthetic peptide
QQFNSYPLT

SEQ ID NO: 3461 - DNA, 373 bp, Artificial Sequence
  Description of Artificial Sequence: Synthetic polynucleotide
caggtgcagctggtggagtctgggggtggcgtggtccagcctgggaggtcgctgagactctcctgtgcagcgtcaggattcacattcactaattatggcatgcactgggtccgccaggttccaggcaaggggctggagtgggtggcagtcatatggcatgatgggagtaatgattactatccagactccttgaagggccgattcaccatctccagagacaattccaggaacacggtgtacctgcaaatgaacagcctgagagccgaggacacggctgtgtattattgtgcgagagattattgtggtcgtcacggctgcatcgacaactggttcgacccctggggccagggaaccctggtcaccgtctcctcag

SEQ ID NO: 3462 - protein, 124 aa, Artificial Sequence
  Description of Artificial Sequence: Synthetic polypeptide
QVQLVESGGGVVQPGRSLRLSCAASGFTFTNYGMHWVRQVPGKGLEWVAVIWHDGSNDYYPDSLKGRFTISRDNSRNTVYLQMNSLRAEDTAVYYCARDYCGRHGCIDNWFDPWGQGTLVTVSS

SEQ ID NO: 3463 - protein, 17 aa, Artificial Sequence
  Description of Artificial Sequence: Synthetic peptide
ARDYCGRHGCIDNWFDP

SEQ ID NO: 3464 - DNA, 319 bp, Artificial Sequence
  Description of Artificial Sequence: Synthetic polynucleotide
gaaatagtgatgacgcagtctccagccaccctgtctgtgtctccaggggaaagagccaccctgtcctgcagggccagtgagagtgttggcaccaacttagcctggtaccggcagaaacctggccaggctcccaggctcctcatctatggtgcatccaccagggccactggtatcccagccaggttcagtgccagtgggtctgggacagagttcactctcagcatcagcagcctgcagtctgaagattttggagtttattactgtcagcagtatgattactggcccctcactttcggcggagggaccaaggtggagatca

SEQ ID NO: 3465 - protein, 106 aa, Artificial Sequence
  Description of Artificial Sequence: Synthetic polypeptide
EIVMTQSPATLSVSPGERATLSCRASESVGTNLAWYRQKPGQAPRLLIYGASTRATGIPARFSASGSGTEFTLSISSLQSEDFGVYYCQQYDYWPLTFGGGTKVEI

SEQ ID NO: 3466 - protein, 9 aa, Artificial Sequence
  Description of Artificial Sequence: Synthetic peptide
QQYDYWPLT

SEQ ID NO: 3467 - DNA, 352 bp, Artificial Sequence
  Description of Artificial Sequence: Synthetic polynucleotide
caggtgcagctggtgcagtctggggctgaggtgaagaagcctgggtcctcggtgagggtctcctgcaaggcttctggaggctccttcagcaactatgctatgaactgggtgcgacaggcccctggacaagggcttgagtggatgggacagatcatccctttctttaaaacaccaaactacgcacagaagtttcagggcagagtcacgattaccgcggacgaatccacgaccacagcctacatggaactgagcagtctaagatctgacgacacggccgtatattactgtgcttcgggcggctacaacccctttgcctactggggccagggaaccctggtcaccgtctcctcag

SEQ ID NO: 3468 - protein, 117 aa, Artificial Sequence
  Description of Artificial Sequence: Synthetic polypeptide
QVQLVQSGAEVKKPGSSVRVSCKASGGSFSNYAMNWVRQAPGQGLEWMGQIIPFFKTPNYAQKFQGRVTITADESTTTAYMELSSLRSDDTAVYYCASGGYNPFAYWGQGTLVTVSS

SEQ ID NO: 3469 - protein, 10 aa, Artificial Sequence
  Description of Artificial Sequence: Synthetic peptide
ASGGYNPFAY

SEQ ID NO: 3470 - DNA, 322 bp, Artificial Sequence
  Description of Artificial Sequence: Synthetic polynucleotide
gacatccagatgacccagtctccatcctccctgtctgcatctgtaggagacagagtcaccatcacttgccaggcgagtcaggacattcgcaactatttaaattggtatcagcagaaaccagggaaagcccctaaggtcctgatctacgatgcatccaatttggaaacaggggtcccatcaaggttcagtggaagtcgatctggggcagattttactttcaccatcagcaacctgcagcctgaagatattgcaacatattactgtcaacagtataatactctcccgaacacctttggccaggggaccaagctggagatcaaac

SEQ ID NO: 3471 - protein, 107 aa, Artificial Sequence
  Description of Artificial Sequence: Synthetic polypeptide
DIQMTQSPSSLSASVGDRVTITCQASQDIRNYLNWYQQKPGKAPKVLIYDASNLETGVPSRFSGSRSGADFTFTISNLQPEDIATYYCQQYNTLPNTFGQGTKLEIK

SEQ ID NO: 3472 - protein, 9 aa, Artificial Sequence
  Description of Artificial Sequence: Synthetic peptide
QQYNTLPNT

SEQ ID NO: 3473 - DNA, 355 bp, Artificial Sequence
  Description of Artificial Sequence: Synthetic polynucleotide
caggtgcagctggtgcagtctggggctgaggtgaagaagcctgggtcctcggtgaaggtctcctgcaaggcttctggaggcaccttcagcaattttgctattagttgggtgcgacaggccccccgacaagggcttgagtggatgggatccatcatccctgcctttggtacaccaaactacgcacagaagtttcagggcagagtcacgataaccgcggacggatccacgagcacagcctacattgaactaagcagcctgagatctggggacacggccgtgtattattgtgcaagagaagacggaagtgggagctacgacgactggggccagggaaccctggtcaccgtctcctcag

SEQ ID NO: 3474 - protein, 118 aa, Artificial Sequence
  Description of Artificial Sequence: Synthetic polypeptide
QVQLVQSGAEVKKPGSSVKVSCKASGGTFSNFAISWVRQAPRQGLEWMGSIIPAFGTPNYAQKFQGRVTITADGSTSTAYIELSSLRSGDTAVYYCAREDGSGSYDDWGQGTLVTVSS

SEQ ID NO: 3475 - protein, 11 aa, Artificial Sequence
  Description of Artificial Sequence: Synthetic peptide
AREDGSGSYDD

SEQ ID NO: 3476 - DNA, 337 bp, Artificial Sequence
  Description of Artificial Sequence: Synthetic polynucleotide
gatattgtgatgactcagtctccactctccctgcccgtcacccctggagagccggcctccatctcctgcaggtctagtcagagcctcctgcatcgggatggatacaactatttggattggtacctgcagaagccagggcagtctccacagctcctgatctatttgggttctaatcgggcctccggggtccctgacaggttcagtggcagtggatcaggcacagatttttcactgaaaatcagcagagtggaggctgaggatgttggggtttattactgcatgcaagctctacaaattcctcggacttttggccaggggaccaagctggagatcaaac

SEQ ID NO: 3477 - protein, 112 aa, Artificial Sequence
  Description of Artificial Sequence: Synthetic polypeptide
DIVMTQSPLSLPVTPGEPASISCRSSQSLLHRDGYNYLDWYLQKPGQSPQLLIYLGSNRASGVPDRFSGSGSGTDFSLKISRVEAEDVGVYYCMQALQIPRTFGQGTKLEIK

SEQ ID NO: 3478 - protein, 9 aa, Artificial Sequence
  Description of Artificial Sequence: Synthetic peptide
MQALQIPRT

SEQ ID NO: 3479 - DNA, 358 bp, Artificial Sequence
  Description of Artificial Sequence: Synthetic polynucleotide
gaggtgcagctggtggagtctgggggaggcctggtccagcctggggggtccctgagactctcctgtgcagcctctggattcacctttaggacctatacgatgaactgggtccgccaggctccagggaaggggctggagtggctttcatacattagtcctaccagtagtgaaacctactacgcagactctttgaagggccgattcaccatctccagagacgatgccaagaagtcactgtatctgcaaatggacagcctgagagccgaagacacggctgtgtattactgtgcgggagccggtgttggctacaattacttttcctcctggggccagggaacactggtcaccgtctcctcag

SEQ ID NO: 3480 - protein, 119 aa, Artificial Sequence
  Description of Artificial Sequence: Synthetic polypeptide
EVQLVESGGGLVQPGGSLRLSCAASGFTFRTYTMNWVRQAPGKGLEWLSYISPTSSETYYADSLKGRFTISRDDAKKSLYLQMDSLRAEDTAVYYCAGAGVGYNYFSSWGQGTLVTVSS

SEQ ID NO: 3481 - protein, 12 aa, Artificial Sequence
  Description of Artificial Sequence: Synthetic peptide
AGAGVGYNYFSS

SEQ ID NO: 3482 - DNA, 325 bp, Artificial Sequence
  Description of Artificial Sequence: Synthetic polynucleotide
gacatccagatgacccagtctccttccaccctgtctgcctctgtaggagacagagtcaccatcacttgccgggccagtcagactattagtacctggttggcctggtatcagcagaaaccagggaaagcccctaagctcgtgatctataaggcgtcttatttacaaagtggggtcccaccaaggttcagcggcagtggatctgggacagaattcactctcaccatcagcagcctgcagcctgatgattttgcaacttattactgccaacagtataatacttattctcagatcactttcggccctgggaccaaactggatatcaaac

SEQ ID NO: 3483 - protein, 108 aa, Artificial Sequence
  Description of Artificial Sequence: Synthetic polypeptide
DIQMTQSPSTLSASVGDRVTITCRASQTISTWLAWYQQKPGKAPKLVIYKASYLQSGVPPRFSGSGSGTEFTLTISSLQPDDFATYYCQQYNTYSQITFGPGTKLDIK

SEQ ID NO: 3484 - protein, 10 aa, Artificial Sequence
  Description of Artificial Sequence: Synthetic peptide
QQYNTYSQIT

SEQ ID NO: 3485 - DNA, 364 bp, Artificial Sequence
  Description of Artificial Sequence: Synthetic polynucleotide
caggtgcagctggtggagtctgggggaggcgtggtccagcctgggaggtccctgagactctcctgtggagtctctggattcaccttcagaagttatggcatgcactgggtccgccaggctccaggcgcggggctggagtgggtggcagttatttccgatgatggaactcagagagaatatggagactccgtgaggggccgattcaccatctccagagacaattcgaagaacaccctatatctgcagatgaacagcctgagagttgaggacacggctgtgtattactgtgcgaaagatccatccgggtggatcgataactggatcggcccctggggccagggaaccgtggtcaccgtctcctcag

SEQ ID NO: 3486 - protein, 121 aa, Artificial Sequence
  Description of Artificial Sequence: Synthetic polypeptide
QVQLVESGGGVVQPGRSLRLSCGVSGFTFRSYGMHWVRQAPGAGLEWVAVISDDGTQREYGDSVRGRFTISRDNSKNTLYLQMNSLRVEDTAVYYCAKDPSGWIDNWIGPWGQGTVVTVSS

SEQ ID NO: 3487 - protein, 14 aa, Artificial Sequence
  Description of Artificial Sequence: Synthetic peptide
AKDPSGWIDNWIGP

SEQ ID NO: 3488 - DNA, 322 bp, Artificial Sequence
  Description of Artificial Sequence: Synthetic polynucleotide
gaaatagtgatgacgcagtctccagccaccctgtctgcgtctccaggggaaagagccaccctctcctgcagggccagtcggagtgttaccagcaacttagcctggtaccagcagaaacctggccaggctcccaggctcgtcatctttggtgtatccaccagggccactggtatcccagccaggtttagtggcagtgggtctgggacagagttcactctcaccatcagcagcctgcagtctgaagattttgcagtatattactgtcaacaatataataactggcccctcactttcggccctgggaccaaagtggaaatcaaac

SEQ ID NO: 3489 - protein, 107 aa, Artificial Sequence
  Description of Artificial Sequence: Synthetic polypeptide
EIVMTQSPATLSASPGERATLSCRASRSVTSNLAWYQQKPGQAPRLVIFGVSTRATGIPARFSGSGSGTEFTLTISSLQSEDFAVYYCQQYNNWPLTFGPGTKVEIK

SEQ ID NO: 3490 - protein, 9 aa, Artificial Sequence
  Description of Artificial Sequence: Synthetic peptide
QQYNNWPLT

SEQ ID NO: 3491 - DNA, 352 bp, Artificial Sequence
  Description of Artificial Sequence: Synthetic polynucleotide
caggtgcagctggtgcagtctggggctgaggtgaagaagcctgggtcctcggtgaaggtctcctgcaaggcttctggatacaccttcaacaactttgcaatcaactgggtgcgacaggcccctggacaaggacttgagtggatgggagggatcatccctacgtttgggacagcaaactacgcgcagaagttccagggcagagtcactattaccgcggacggatccacgagcacagtctacatggaactgagccacctgagatctgaggacacggccctatattactgtgcaagagacggggttaccctctgtgactactggggccagggaaccctggtcaccgtctcctcag

SEQ ID NO: 3492 - protein, 117 aa, Artificial Sequence
  Description of Artificial Sequence: Synthetic polypeptide
QVQLVQSGAEVKKPGSSVKVSCKASGYTFNNFAINWVRQAPGQGLEWMGGIIPTFGTANYAQKFQGRVTITADGSTSTVYMELSHLRSEDTALYYCARDGVTLCDYWGQGTLVTVSS

SEQ ID NO: 3493 - protein, 10 aa, Artificial Sequence
  Description of Artificial Sequence: Synthetic peptide
ARDGVTLCDY

SEQ ID NO: 3494 - DNA, 337 bp, Artificial Sequence
  Description of Artificial Sequence: Synthetic polynucleotide
gatgttgtgatgactcagtctccagtctccctgcccgtcacccttggacagccggcctccatctcctgcaggtctagtcaaagcctcgtctacagagatggaaacacctacttgaattggtttcaccagaggccgggccaatctccaaggcgcctaatttataacgtttctaatcgcgattctggggtcccagacagattcagcggcagtgggtcaggcactgatttcacactgaaaatcagcagggtggaggctgaggatgttggggtttattactgcatgcaaggtacacactggcctaggacgttcggccaagggaccaaggtggaaatcaaac

SEQ ID NO: 3495 - protein, 112 aa, Artificial Sequence
  Description of Artificial Sequence: Synthetic polypeptide
DVVMTQSPVSLPVTLGQPASISCRSSQSLVYRDGNTYLNWFHQRPGQSPRRLIYNVSNRDSGVPDRFSGSGSGTDFTLKISRVEAEDVGVYYCMQGTHWPRTFGQGTKVEIK

SEQ ID NO: 3496 - protein, 9 aa, Artificial Sequence
  Description of Artificial Sequence: Synthetic peptide
MQGTHWPRT

SEQ ID NO: 3497 - DNA, 355 bp, Artificial Sequence
  Description of Artificial Sequence: Synthetic polynucleotide
caggtgcagctggtgcagtctggggctgacgtgaagaagcctgggtcctcggttaaggtctcctgcaggacttctggaggcaccttcaacaactatgctatcaactgggtgcgacaggcccctggacaagggcttgagtggatgggagggatcatccctgtctttgggacagcaaaatacgcaaagaagttccagggcagagtcacggttactgcggacgaatccacgagcacagcctacttggaactgaacagcctgacacctgaggacacggccttttattactgcgcgagagatgggggagggggctcctttgactactggggccagggaaccctggtcaccgtctcctcag

SEQ ID NO: 3498 - protein, 118 aa, Artificial Sequence
  Description of Artificial Sequence: Synthetic polypeptide
QVQLVQSGADVKKPGSSVKVSCRTSGGTFNNYAINWVRQAPGQGLEWMGGIIPVFGTAKYAKKFQGRVTVTADESTSTAYLELNSLTPEDTAFYYCARDGGGGSFDYWGQGTLVTVSS

SEQ ID NO: 3499 - protein, 11 aa, Artificial Sequence
  Description of Artificial Sequence: Synthetic peptide
ARDGGGGSFDY

SEQ ID NO: 3500 - DNA, 340 bp, Artificial Sequence
  Description of Artificial Sequence: Synthetic polynucleotide
gatattgtgatgactcagtctccactctccctgcccgtcacccctggagagccggcctccatctcctgcaaatctagtcagagcctcctacatcgtactggatacaactatttggattggtacctgcagaagccagggcagcctccacagctcctgatctatttgggttctcatcgggcctccggggtccctgacaggttcagtggcagtggatcaggcacagattttacactgaaaatcagcagagtggaggctgaggatgttggggtttattactgcatgccaactctacaaactctcatgtacacttttggccaggggaccaagctggagatcaaac

SEQ ID NO: 3501 - protein, 113 aa, Artificial Sequence
  Description of Artificial Sequence: Synthetic polypeptide
DIVMTQSPLSLPVTPGEPASISCKSSQSLLHRTGYNYLDWYLQKPGQPPQLLIYLGSHRASGVPDRFSGSGSGTDFTLKISRVEAEDVGVYYCMPTLQTLMYTFGQGTKLEIK

SEQ ID NO: 3502 - protein, 10 aa, Artificial Sequence
  Description of Artificial Sequence: Synthetic peptide
MPTLQTLMYT

SEQ ID NO: 3503 - DNA, 390 bp, Artificial Sequence
  Description of Artificial Sequence: Synthetic polynucleotide
gaggtgcagctggtggagtctgggggaggcttggtccagcctgggaggtccctgagactctcctgtgcagcctctggattcacgttaagtattcattggatgagttgggtccgccaggctcctgggaaggggctggagtgggtggccaacataaatcaagatggaagtgcgaaataccatttggactctgtgaagggccggttcaccatctccagagacaacgccaagaatgcactgtctctgcaaatgaacagcctgagaggcgaggacacggctgtttattactgtgcgagagttggatcaatagaggccgcaccacaacctgatagaccctactactactactacatggacgtctggggcaaagggaccacggtcaccgtctcctca

SEQ ID NO: 3504 - protein, 130 aa, Artificial Sequence; identical to SEQ ID NO: 27
  Description of Artificial Sequence: Synthetic polypeptide

SEQ ID NO: 3505 - protein, 23 aa, Artificial Sequence
  Description of Artificial Sequence: Synthetic peptide
ARVGSIEAAPQPDRPYYYYYMDV

SEQ ID NO: 3506 - DNA, 325 bp, Artificial Sequence
  Description of Artificial Sequence: Synthetic polynucleotide
  modified_base (59)..(59): a, c, t, g, unknown or other
  modified_base (61)..(61): a, c, t, g, unknown or other
gacatccagatgacccagtctccatcctccctgtctgcatctgtgggagacagagtctncntcacttgccggacaagtcagagtatttacaactatttaaattggtatcaacacaaaccagggaaagcccctaaactcctgatttttgctgcatccagtttgcaaggtggcgtcccaacaaggttcagtggcagtggatctgggacagagttcactctcaccatcagcagtctgcaacctgaagattttgcaatttactactgtcaacagagttacagtacccctgcgctcactttcggcggagggaccagggtggagatcaaac

SEQ ID NO: 3507 - protein, 108 aa, Artificial Sequence
  Description of Artificial Sequence: Synthetic polypeptide
  MOD_RES (20)..(21): Any amino acid
DIQMTQSPSSLSASVGDRVXXTCRTSQSIYNYLNWYQHKPGKAPKLLIFAASSLQGGVPTRFSGSGSGTEFTLTISSLQPEDFAIYYCQQSYSTPALTFGGGTRVEIK

SEQ ID NO: 3508 - protein, 10 aa, Artificial Sequence
  Description of Artificial Sequence: Synthetic peptide
QQSYSTPALT

SEQ ID NO: 3509 - DNA, 355 bp, Artificial Sequence
  Description of Artificial Sequence: Synthetic polynucleotide
caggtgcagctggtgcagtctggggctgaggtgaagaagcctgggtcctcggtgaaggtctcctgcaaggcttctggaggcatcttcagcaactatgctatcaactgggtgcgacaggcccctggacaagggcttgagtggatgggacggatcatccctttctttggtacaccagactacgcacagaagttcctgggcagagtctcgattaccgcggacgattccacgagcacaggctacatggagctgagcagcctgagatctgaggacacggccgtctattactgtgcgagagacggagggactacttttcttgactactggggccagggaaccctggtcaccgtctcctcag

SEQ ID NO: 3510 - protein, 118 aa, Artificial Sequence
  Description of Artificial Sequence: Synthetic polypeptide
QVQLVQSGAEVKKPGSSVKVSCKASGGIFSNYAINWVRQAPGQGLEWMGRIIPFFGTPDYAQKFLGRVSITADDSTSTGYMELSSLRSEDTAVYYCARDGGTTFLDYWGQGTLVTVSS

SEQ ID NO: 3511 - protein, 11 aa, Artificial Sequence
  Description of Artificial Sequence: Synthetic peptide
ARDGGTTFLDY

SEQ ID NO: 3512 - DNA, 337 bp, Artificial Sequence
  Description of Artificial Sequence: Synthetic polynucleotide
gatattgtgatgacccagactccagtctccctgtccgtcacccctggacagccggcctccatctcctgcaagtctagtcagagcctccttcatagagatggaaagacctatttgtattggtacgtgcagaagccaggccagcctccacagctcctgatctatgaagtttccaaccggttgtctggagtgccagataggttcagtggcagcgggtcagggacagatttcacactgaaaatcagccgggtggaggctgaggatgttggggtttattactgcatggaaagtatacagcttcctctcactttcggcggagggaccaaggtggagatcaaac

SEQ ID NO: 3513 - protein, 112 aa, Artificial Sequence
  Description of Artificial Sequence: Synthetic polypeptide
DIVMTQTPVSLSVTPGQPASISCKSSQSLLHRDGKTYLYWYVQKPGQPPQLLIYEVSNRLSGVPDRFSGSGSGTDFTLKISRVEAEDVGVYYCMESIQLPLTFGGGTKVEIK

SEQ ID NO: 3514 - protein, 9 aa, Artificial Sequence
  Description of Artificial Sequence: Synthetic peptide
MESIQLPLT

SEQ ID NO: 3515 - DNA, 352 bp, Artificial Sequence
  Description of Artificial Sequence: Synthetic polynucleotide
caggtgcagctggtgcagtctggggctgaggtgaagacgcctgggtcctcggtgaaggtctcctgcaaggcttcaggatacaccttcagcaactatgctatcaactgggtgcgacaggcccctggacaaaggcttgaattaatgggagggatcgtcccagcctttgcaagaccaaactacgcacagaagttccagggcagagtcacgattaccgcggacgaatccacgagcacagcctacatggaactgagcagcctgagatctgaggacacggccatttattactgtgcgagagatagtagtgtgctttttgactactggggccagggaaccctggtcaccgtctcctcag

SEQ ID NO: 3516 - protein, 117 aa, Artificial Sequence
  Description of Artificial Sequence: Synthetic polypeptide
QVQLVQSGAEVKTPGSSVKVSCKASGYTFSNYAINWVRQAPGQRLELMGGIVPAFARPNYAQKFQGRVTITADESTSTAYMELSSLRSEDTAIYYCARDSSVLFDYWGQGTLVTVSS

SEQ ID NO: 3517 - protein, 10 aa, Artificial Sequence
  Description of Artificial Sequence: Synthetic peptide
ARDSSVLFDY

SEQ ID NO: 3518 - DNA, 337 bp, Artificial Sequence
  Description of Artificial Sequence: Synthetic polynucleotide
gatgttgtgatgactcagtctccactctccctgcccgtcacccttggacagccggcctccatctcctgcaggtctagtcaaagcctcgtatacagtgatggaaacacctacttgagttggtttcagcagaggccaggccaatctccaaggctcctaatttatcaggtttctaaccgggactctggggtcccagacagattcagcggcagtgggtcaggcactgatttcacactgaaaatcagcagggtggaggctgaggatgtcggggcttactactgcatgcaagggacacactggcctaggacgttcggccaagggaccaaggtggaaatcaaac

SEQ ID NO: 3519 - protein, 112 aa, Artificial Sequence
  Description of Artificial Sequence: Synthetic polypeptide
DVVMTQSPLSLPVTLGQPASISCRSSQSLVYSDGNTYLSWFQQRPGQSPRLLIYQVSNRDSGVPDRFSGSGSGTDFTLKISRVEAEDVGAYYCMQGTHWPRTFGQGTKVEIK

SEQ ID NO: 3520 - protein, 9 aa, Artificial Sequence
  Description of Artificial Sequence: Synthetic peptide
MQGTHWPRT

SEQ ID NO: 3521 - DNA, 358 bp, Artificial Sequence
  Description of Artificial Sequence: Synthetic polynucleotide
caggtgcagctggtgcagtctggggctgaggtgaagaagcctgggtcctcggtgagggtctcctgcaaggcttctggaggcgccttcagcaactatgctttcagctgggtgcgacaggcccctggacaagggcttgagtggatgggagtgatcatccctgtctttggtacaccatactatgcacagaagttccagggcagactcacgattagcgcggacgaatccgcgaccacagcctatatggatctgagcaccctgacatctgacgacacggccgtgtattactgtgcgagagggggaggagcagtggctgccaatccttactggggccagggaaccctggtcaccgtctcctcag

SEQ ID NO: 3522 - protein, 119 aa, Artificial Sequence
  Description of Artificial Sequence: Synthetic polypeptide
QVQLVQSGAEVKKPGSSVRVSCKASGGAFSNYAFSWVRQAPGQGLEWMGVIIPVFGTPYYAQKFQGRLTISADESATTAYMDLSTLTSDDTAVYYCARGGGAVAANPYWGQGTLVTVSS

SEQ ID NO: 3523 - protein, 12 aa, Artificial Sequence
  Description of Artificial Sequence: Synthetic peptide
ARGGGAVAANPY

SEQ ID NO: 3524 - DNA, 325 bp, Artificial Sequence
  Description of Artificial Sequence: Synthetic polynucleotide
gacatccagatgacccagtctccttccaccctgtctgcatttgtgggagacagagtcaccatcacttgccgggccagtcagagtattagtagctggttggcctggtatcaacagaaaccagggaaagcccctaagctcctgatctattcggcgtctagtttagaaactggggtcccatcaaggttcagcggcagtggatctgggacagaattcactctcaccatcagcggcctgcagcctgatgattttgcaacttattactgccaacagtataatagttattcgtcgctcactttcggcggagggaccaaggtggagatcaaac

SEQ ID NO: 3525 - protein, 108 aa, Artificial Sequence
  Description of Artificial Sequence: Synthetic polypeptide
DIQMTQSPSTLSAFVGDRVTITCRASQSISSWLAWYQQKPGKAPKLLIYSASSLETGVPSRFSGSGSGTEFTLTISGLQPDDFATYYCQQYNSYSSLTFGGGTKVEIK

SEQ ID NO: 3526 - protein, 10 aa, Artificial Sequence
  Description of Artificial Sequence: Synthetic peptide
QQYNSYSSLT

SEQ ID NO: 3527 - DNA, 396 bp, Artificial Sequence
  Description of Artificial Sequence: Synthetic polynucleotide
caggtgcagctggtggagtctgggggaggcttggtcaagcctggagggtccctgagactctcctgtgcagcctctggattcaccttcagtgattcctacatgagctggatccgccaggctccagggaaggggctggagtgggtttcatattttattagtagtgatggtaccatatactacgcagactctgtgaagggccgattcaccatgtccagggacaacgccaagaatttactgtatctgcaaatgaacagcctgagcgccgaggactcggccgtctattactgtgcgagagtccattatacccgcgcagattgtggtgctgattgctcttgggtcccctacttctactactacatggacgtctggggcaaagggaccactgtcaccgtctcc

SEQ ID NO: 3528 - protein, 132 aa, Artificial Sequence
  Description of Artificial Sequence: Synthetic polypeptide
QVQLVESGGGLVKPGGSLRLSCAASGFTFSDSYMSWIRQAPGKGLEWVSYFISSDGTIYYADSVKGRFTMSRDNAKNLLYLQMNSLSAEDSAVYYCARVHYTRADCGADCSWVPYFYYYMDVWGKGTTVTVS

SEQ ID NO: 3529 - protein, 26 aa, Artificial Sequence
  Description of Artificial Sequence: Synthetic peptide
ARVHYTRADCGADCSWVPYFYYYMDV

SEQ ID NO: 3530 - DNA, 322 bp, Artificial Sequence
  Description of Artificial Sequence: Synthetic polynucleotide
gacatccagatgacccagtctccatcctccctgtctgcatctgtaggagacagagtcaccattacttgccgggcgagtcagagcatgagcaactatttaaattggtatcagcagaaaccagggaaagcccctaagctcctgatctatgctgcatcccgtttgcaacgtggggtcccatcaaggttcagtggcagtggatctgagacagatttcgctctcaccatcagcaatctgcaacctgaagattttgcaacttattactgtcaacagacttacggtacccccttcactttcggccctgggaccaagctggatatcaaac

SEQ ID NO: 3531 - protein, 107 aa, Artificial Sequence
  Description of Artificial Sequence: Synthetic polypeptide
DIQMTQSPSSLSASVGDRVTITCRASQSMSNYLNWYQQKPGKAPKLLIYAASRLQRGVPSRFSGSGSETDFALTISNLQPEDFATYYCQQTYGTPFTFGPGTKLDIK

SEQ ID NO: 3532 - protein, 9 aa, Artificial Sequence
  Description of Artificial Sequence: Synthetic peptide
QQTYGTPFT

SEQ ID NO: 3533 - DNA, 376 bp, Artificial Sequence
  Description of Artificial Sequence: Synthetic polynucleotide
caggtgcagctggtgcagtctggggctgaggtgaagaagcctggggcctcagtgaaggtttcctgtaaggcatctggatacaccttcaccgagtaccatatacattgggtgcgacaggcccctggacaagggcctgagtggatgggagttatcaaccctagtgccggtagcacagcctacgcacagaagttccagggcagagtcaccatgaccagggacacgtccacgagctcagcctacatggagctgaggagcctgacatctgacgacacggccgtgtattattgtgttagagatgtcgaatacaatggcaacagttgggggtggggctggttcgacccctggggccagggaaccctggtcaccgtctcctcag

SEQ ID NO: 3534 - protein, 125 aa, Artificial Sequence
  Description of Artificial Sequence: Synthetic polypeptide
QVQLVQSGAEVKKPGASVKVSCKASGYTFTEYHIHWVRQAPGQGPEWMGVINPSAGSTAYAQKFQGRVTMTRDTSTSSAYMELRSLTSDDTAVYYCVRDVEYNGNSWGWGWFDPWGQGTLVTVSS

SEQ ID NO: 3535 - protein, 18 aa, Artificial Sequence
  Description of Artificial Sequence: Synthetic peptide
VRDVEYNGNSWGWGWFDP

SEQ ID NO: 3536 - DNA, 337 bp, Artificial Sequence
  Description of Artificial Sequence: Synthetic polynucleotide
gacatcgtgatgacccagtctccagactccctggctgtgtctctgggcgagagggccaccatccactgcaagtccagtcagagtgttttatacagctccaacaatcacaattacttagcttggtaccagcagaaaccaggacagcctcctaagttgctcatttattgggcatctacccgggaatccggggtccctgaccgattcagtggcagcgggtctgggacagatttcactctcaccatcagcagcctgcaggctgaagatgtggcagtctattactgtcagcaatattatagcaatccgatcaccttcggccaagggacacgactggagatta

SEQ ID NO: 3537 - protein, 112 aa, Artificial Sequence
  Description of Artificial Sequence: Synthetic polypeptide
DIVMTQSPDSLAVSLGERATIHCKSSQSVLYSSNNHNYLAWYQQKPGQPPKLLIYWASTRESGVPDRFSGSGSGTDFTLTISSLQAEDVAVYYCQQYYSNPITFGQGTRLEI

SEQ ID NO: 3538 - protein, 9 aa, Artificial Sequence
  Description of Artificial Sequence: Synthetic peptide
QQYYSNPIT

SEQ ID NO: 3539 - DNA, 373 bp, Artificial Sequence; identical to SEQ ID NO: 181
  Description of Artificial Sequence: Synthetic polynucleotide

SEQ ID NO: 3540 - protein, 124 aa, Artificial Sequence; identical to SEQ ID NO: 63
  Description of Artificial Sequence: Synthetic polypeptide

SEQ ID NO: 3541 - protein, 17 aa, Artificial Sequence
  Description of Artificial Sequence: Synthetic peptide
ARDYCGRNGCIDNWFDP

SEQ ID NO: 3542 - DNA, 322 bp, Artificial Sequence; identical to SEQ ID NO: 182
  Description of Artificial Sequence: Synthetic polynucleotide

SEQ ID NO: 3543 - protein, 107 aa, Artificial Sequence; identical to SEQ ID NO: 64
  Description of Artificial Sequence: Synthetic polypeptide

SEQ ID NO: 3544 - protein, 9 aa, Artificial Sequence
  Description of Artificial Sequence: Synthetic peptide
QQYDYWPLT

SEQ ID NO: 3545 - DNA, 352 bp, Artificial Sequence
  Description of Artificial Sequence: Synthetic polynucleotide
caggtgcagctggtgcagtctggggctgaggtgcagaagcctgggtcctcggtgaaggtctcctgcaaggcttctgggggcaccttcaacacctttgcactcaactgggtgcgacaggcccctggacaagggcttgagtggatgggagggatcatccctgcctttggaacaccaaactacgcacagaagttccagggcagagtcacgattaccgcggacatatccacgagcacagcctacatggaactgagcagcctgagatctgaggacacggccgtgtattactgttcgagaggagttagtggctggttcgcctactggggccagggaacgctggtcaccgtctcctcag

SEQ ID NO: 3546 - protein, 117 aa, Artificial Sequence
  Description of Artificial Sequence: Synthetic polypeptide
QVQLVQSGAEVQKPGSSVKVSCKASGGTFNTFALNWVRQAPGQGLEWMGGIIPAFGTPNYAQKFQGRVTITADISTSTAYMELSSLRSEDTAVYYCSRGVSGWFAYWGQGTLVTVSS

SEQ ID NO: 3547 - protein, 10 aa, Artificial Sequence
  Description of Artificial Sequence: Synthetic peptide
SRGVSGWFAY

SEQ ID NO: 3548 - DNA, 322 bp, Artificial Sequence
  Description of Artificial Sequence: Synthetic polynucleotide
gacatccagatgacccagtctccatcctccctgtctgcatctgtaggcgacagagtcaccatcacttgccaggcgagtcaggacattagcgactatttaaattggtatcagcagaaaccagggaaaccccctaagctcctgatctacgatgcatccaatttggaaacaggggtcccatcaaggttcagtggaagtggatctgggacagattttactttcaccatcagcagcctgcagcctgaagacattgcaacatattactgtcaacagtatgataatctccgcagtattttcggccctgggaccagagtggacatcaaac

SEQ ID NO: 3549 - protein, 107 aa, Artificial Sequence
  Description of Artificial Sequence: Synthetic polypeptide
DIQMTQSPSSLSASVGDRVTITCQASQDISDYLNWYQQKPGKPPKLLIYDASNLETGVPSRFSGSGSGTDFTFTISSLQPEDIATYYCQQYDNLRSIFGPGTRVDIK

SEQ ID NO: 3550 - protein, 9 aa, Artificial Sequence
  Description of Artificial Sequence: Synthetic peptide
QQYDNLRSI

SEQ ID NO: 3551 - DNA, 349 bp, Artificial Sequence
  Description of Artificial Sequence: Synthetic polynucleotide
gaggtgcagctggtggagtctgggggaggcctggtcaggccgggggggtccctgagactctcctgtgcagcctctggattcaccttcagtaactataacatgaactgggtccgccaggctccaggcaagggtctggagtgggtctcctccattagttatagtgctaattacaaatactacgcagactcactgaagggccgattcaccatctccagagacaacgccgagaactcactgtttctgcaaatgaacagcctgacggccgaggacacggctatatattactgtgcgagatcctatgggggttttgactactggggccagggactcctggtcaccgtctcctcag

SEQ ID NO: 3552 - protein, 116 aa, Artificial Sequence
  Description of Artificial Sequence: Synthetic polypeptide
EVQLVESGGGLVRPGGSLRLSCAASGFTFSNYNMNWVRQAPGKGLEWVSSISYSANYKYYADSLKGRFTISRDNAENSLFLQMNSLTAEDTAIYYCARSYGGFDYWGQGLLVTVSS

SEQ ID NO: 3553 - protein, 9 aa, Artificial Sequence
  Description of Artificial Sequence: Synthetic peptide
ARSYGGFDY

SEQ ID NO: 3554 - DNA, 320 bp, Artificial Sequence
  Description of Artificial Sequence: Synthetic polynucleotide
gccatccagttgacccagtctccatcctccctgtctgcatctgcaggagacagagtcaccatcacttgccgggcaagccagggcattagcaatgctttagcctggtatcagcagaaaccagggaaacctcctaagctcctgatctatgatgcctccactttggacagtggggtcccatcaaggttcagcggcagtggatctgggacagacttcactctcaccatcagcagcctgcagcctgcagattttgcaacttattactgtcaacagtttcaaagttacccgtacacttttggccgggggaccaagttggagatcaa

SEQ ID NO: 3555 - protein, 106 aa, Artificial Sequence
  Description of Artificial Sequence: Synthetic polypeptide
AIQLTQSPSSLSASAGDRVTITCRASQGISNALAWYQQKPGKPPKLLIYDASTLDSGVPSRFSGSGSGTDFTLTISSLQPADFATYYCQQFQSYPYTFGRGTKLEI

SEQ ID NO: 3556 - protein, 9 aa, Artificial Sequence
  Description of Artificial Sequence: Synthetic peptide
QQFQSYPYT

SEQ ID NO: 3557 - DNA, 364 bp, Artificial Sequence
  Description of Artificial Sequence: Synthetic polynucleotide
caggtgcagctggtggagtctgggggaggcgtggtccaccctgggaggtccctgagactctcctgtgcagcctctggattcaccttctatagctatgctatgcactgggtccgccaggctccaggcaaggggctggagtgggtggccgctatatcctatgatggaagcactacatactatgcagactccgtgaagggccgattcaccatctccagagacaattccaagaacacgctgtatgcgcaaatgaacagcctcagagatgaggacaccgctatgtattactgtgcgaccagcggtggaaatccccggcgcgtcttctttgacaactggggccagggaacgctggtcaccgtctcctcag

SEQ ID NO: 3558 - protein, 121 aa, Artificial Sequence
  Description of Artificial Sequence: Synthetic polypeptide
QVQLVESGGGVVHPGRSLRLSCAASGFTFYSYAMHWVRQAPGKGLEWVAAISYDGSTTYYADSVKGRFTISRDNSKNTLYAQMNSLRDEDTAMYYCATSGGNPRRVFFDNWGQGTLVTVSS

SEQ ID NO: 3559 - protein, 14 aa, Artificial Sequence
  Description of Artificial Sequence: Synthetic peptide
ATSGGNPRRVFFDN

SEQ ID NO: 3560 - DNA, 322 bp, Artificial Sequence
  Description of Artificial Sequence: Synthetic polynucleotide
gaaatagtgatgacgcagtctccagccaccctgtctgtgtctccaggggaaagagccaccctctcctgcagggccagtcagagtattatcagcaacttagcctggtaccagcagaaacctggccaggctcccagactcctcatctttgctgcatccaccagggccactggtatcccagccaggttcagtggcagtgggtctgggacagagttcactctcaccatcagcagcctgcagtctgaggactttgcagtttactactgtcagcagtataattactggccgggaactttcggccctgggaccaaagtggatatcaaac

SEQ ID NO: 3561 - protein, 107 aa, Artificial Sequence
  Description of Artificial Sequence: Synthetic polypeptide
EIVMTQSPATLSVSPGERATLSCRASQSIISNLAWYQQKPGQAPRLLIFAASTRATGIPARFSGSGSGTEFTLTISSLQSEDFAVYYCQQYNYWPGTFGPGTKVDIK

SEQ ID NO: 3562 - protein, 9 aa, Artificial Sequence
  Description of Artificial Sequence: Synthetic peptide
QQYNYWPGT

SEQ ID NO: 3563 - DNA, 367 bp, Artificial Sequence
  Description of Artificial Sequence: Synthetic polynucleotide
caggtgcagctgcaggagtcgggcccaggagtggtgaagccttcggagaccctgtttctcacctgccctgtctctggtggctccgtcagcagtagatttcactattggggctggatccggcagcccccagggaaggcactggaatggattgcatatgtttattacactgggagtgccaactacaatccctccctcaagagtcgagtcaccatatcagtggacatgtccaagaatcagttctccctgacgttgacgtctgtgaccgctgcggacacggccgtctattattgtgcgagagccccttatggcagtgcctggcacggttttgaccactggggccagggaaccccggtcgcagtctcgtcag

SEQ ID NO: 3564 - protein, 122 aa, Artificial Sequence
  Description of Artificial Sequence: Synthetic polypeptide
QVQLQESGPGVVKPSETLFLTCPVSGGSVSSRFHYWGWIRQPPGKALEWIAYVYYTGSANYNPSLKSRVTISVDMSKNQFSLTLTSVTAADTAVYYCARAPYGSAWHGFDHWGQGTPVAVSS

SEQ ID NO: 3565 - protein, 14 aa, Artificial Sequence
  Description of Artificial Sequence: Synthetic peptide
ARAPYGSAWHGFDH

SEQ ID NO: 3566 - DNA, 334 bp, Artificial Sequence
  Description of Artificial Sequence: Synthetic polynucleotide
cagtctgtgctgactcagccaccctcagcgtctgggacccccgggcagagggtcaccatctcttgttctggaagcagctccaacatcggaggtaatcctgtagagtggtaccaggtactccccggaacggcccccaaactgctcatctatagtactaatcaccggccctcaggggtccctgaccgattctctggctccaagtctggcacctcagcctccctggccatcagtggactccagtctgaggatgaggctgattattactgttcagcatgggatgacagcctgaatggtcacgtggttttcggcggagggaccaagttgaccgtcctag

SEQ ID NO: 3567 - protein, 111 aa, Artificial Sequence
  Description of Artificial Sequence: Synthetic polypeptide
QSVLTQPPSASGTPGQRVTISCSGSSSNIGGNPVEWYQVLPGTAPKLLIYSTNHRPSGVPDRFSGSKSGTSASLAISGLQSEDEADYYCSAWDDSLNGHVVFGGGTKLTVL

SEQ ID NO: 3568 - protein, 12 aa, Artificial Sequence
  Description of Artificial Sequence: Synthetic peptide
SAWDDSLNGHVV

SEQ ID NO: 3569 - DNA, 362 bp, Artificial Sequence
  Description of Artificial Sequence: Synthetic polynucleotide
caggtgcagctgcaggagtcgggcccaggactggtgaggccttcggagaccctgtcccttacctgcactgtctctggtggcttcatcaataactatcactggagctggatccggcagcccccagggaagggactggagtggattggctatgtctttcacagtgggggcgccaattacaacccctccctcaagagtcgagtcaccatttcagttgacacgtccaagacccggttctccctgaagctgagctctgtgaccgctgcggacacggccatgtattactgtgccagaacccacacagtgacatctaacactgactggtacttcgatctctggggccgtggcgccctggtcactgtctc

SEQ ID NO: 3570 - protein, 120 aa, Artificial Sequence
  Description of Artificial Sequence: Synthetic polypeptide
QVQLQESGPGLVRPSETLSLTCTVSGGFINNYHWSWIRQPPGKGLEWIGYVFHSGGANYNPSLKSRVTISVDTSKTRFSLKLSSVTAADTAMYYCARTHTVTSNTDWYFDLWGRGALVTV

SEQ ID NO: 3571 - protein, 16 aa, Artificial Sequence
  Description of Artificial Sequence: Synthetic peptide
ARTHTVTSNTDWYFDL

SEQ ID NO: 3572 - DNA, 331 bp, Artificial Sequence
  Description of Artificial Sequence: Synthetic polynucleotide
cagtctgtgctgactcagccaccctcagcgtctgggacccccgggcagagtgtcaccatctcttgttttggaagcagctccaacatcggaagtaattttgtatactggtatcagcagctcccaggaacggcccccaaactcctcatctataggaatgatgagcggccctcaggggtccctgaccgattctctggctccaagtctggcacctcagcctccctggccatcagtgggctccggtccgaggatgaggctgattattactgtgcagcttgggatgacagcctgagtggtcctgtcttcggacctgggaccaaggtctccgtcctag

SEQ ID NO: 3573 - protein, 110 aa, Artificial Sequence
  Description of Artificial Sequence: Synthetic polypeptide
QSVLTQPPSASGTPGQSVTISCFGSSSNIGSNFVYWYQQLPGTAPKLLIYRNDERPSGVPDRFSGSKSGTSASLAISGLRSEDEADYYCAAWDDSLSGPVFGPGTKVSVL

SEQ ID NO: 3574 - protein, 11 aa, Artificial Sequence
  Description of Artificial Sequence: Synthetic peptide
AAWDDSLSGPV

SEQ ID NO: 3575 - DNA, 349 bp, Artificial Sequence
  Description of Artificial Sequence: Synthetic polynucleotide
caggtgcagctggtggagtctgggggaggcgtggtccagcctgggaggtccctgagactctcctgtgaaggcactggattcaccttcagtcactatccgatgcactgggtccgccaggctccaggcaaggggctagaatggctggcaatgatatcatatgatggaagcaaaacatactccgcagactccgtgaagggccgattcaccatctccagagacaattccaagaatacactgtatctacaaatgaacagcctgagaagtggggacacggctgtgtattggtgtgcgagaggtcatttcgggttcgacccctggggcctgggaaccctggtcaccgtctcctcag

SEQ ID NO: 3576 - protein, 116 aa, Artificial Sequence
  Description of Artificial Sequence: Synthetic polypeptide
QVQLVESGGGVVQPGRSLRLSCEGTGFTFSHYPMHWVRQAPGKGLEWLAMISYDGSKTYSADSVKGRFTISRDNSKNTLYLQMNSLRSGDTAVYWCARGHFGFDPWGLGTLVTVSS

SEQ ID NO: 3577 - protein, 9 aa, Artificial Sequence
  Description of Artificial Sequence: Synthetic peptide
ARGHFGFDP

SEQ ID NO: 3578 - DNA, 331 bp, Artificial Sequence
  Description of Artificial Sequence: Synthetic polynucleotide
cagtctgtgctgactcagcctgcctccgtgtctgggtctcctggacagtcgatcaccatctcttgcactggaaccagcagtgacattggtacttataactatgtctcctggtaccaacaacacccaggcgaagcccccaaggtcatgatttatgatgtcagtgatcggccctcaggggtttctaatcgcttctctggctccaagtctggcaacacggcctccctgaccatctctgggctccaggctgaggacgaggctgattattattgcatctcatatacaagcagcagcacttttgtcttcggaacggggaccaaggtcaccgtcttag

SEQ ID NO: 3579 - protein, 110 aa, Artificial Sequence
  Description of Artificial Sequence: Synthetic polypeptide
QSVLTQPASVSGSPGQSITISCTGTSSDIGTYNYVSWYQQHPGEAPKVMIYDVSDRPSGVSNRFSGSKSGNTASLTISGLQAEDEADYYCISYTSSSTFVFGTGTKVTVL

SEQ ID NO: 3580 - protein, 10 aa, Artificial Sequence
  Description of Artificial Sequence: Synthetic peptide
ISYTSSSTFV

SEQ ID NO: 3581 - DNA, 348 bp, Artificial Sequence
  Description of Artificial Sequence: Synthetic polynucleotide
caggtgcagctggtggagtctgggggaggcgtggtccagcctgggaggtccctgagactctcctgtgcagcgtctggattcaccttcagtacctttggcatgcactgggtccgccaggctccaggcaggggactggagtgggtggctttcataggatatgatggtagtactaaattctatgcagactccgtgaagggccagatcaccatctctagagacaattccaagaacactctgtatctgcaaatcaacagcctgagaggcgacgacacggccgtctattactgtgcgagaggtggacacggatgggaccactggggccagggcaccctcgtcaccgtctcctca

SEQ ID NO: 3582 - protein, 116 aa, Artificial Sequence
  Description of Artificial Sequence: Synthetic polypeptide
QVQLVESGGGVVQPGRSLRLSCAASGFTFSTFGMHWVRQAPGRGLEWVAFIGYDGSTKFYADSVKGQITISRDNSKNTLYLQINSLRGDDTAVYYCARGGHGWDHWGQGTLVTVSS

SEQ ID NO: 3583 - protein, 9 aa, Artificial Sequence
  Description of Artificial Sequence: Synthetic peptide
ARGGHGWDH

SEQ ID NO: 3584 - DNA, 332 bp, Artificial Sequence
  Description of Artificial Sequence: Synthetic polynucleotide
cagtctgtgctgactcagcctgcctccgtgtctgggtctcctggacaggcgatcaccatctcctgcactggaaccagcagtgacgttggtggttataactttgtctcgtggttccaacagcgcccaggcaaagcccccaaactcatgatttatgatgtcagtaatcggccctcaggaatttctcatcgcttctctggctccaagtctggcaacacggcctccctgaccatctctgggctccagactgatgacgaggctgattattactgcagctcatatacaaacacgggcactccctgggtgttcggcggagggaccaagctgaccgtcct

SEQ ID NO: 3585 - protein, 110 aa, Artificial Sequence
  Description of Artificial Sequence: Synthetic polypeptide
QSVLTQPASVSGSPGQAITISCTGTSSDVGGYNFVSWFQQRPGKAPKLMIYDVSNRPSGISHRFSGSKSGNTASLTISGLQTDDEADYYCSSYTNTGTPWVFGGGTKLTV

SEQ ID NO: 3586 - protein, 11 aa, Artificial Sequence
  Description of Artificial Sequence: Synthetic peptide
SSYTNTGTPWV

SEQ ID NO: 3587 - DNA, 361 bp, Artificial Sequence
  Description of Artificial Sequence: Synthetic polynucleotide
caggtgcagctggtggagtctgggggaggcgtggtccagcctgggaggtccctgagactctcctgtgcggcctctggattcaccttccttagttatgcaatgcactgggtccgccaggctcctggcaaggggctggagtgggtggccggtgtatcaaatgatggaagcaatgaacactacgcagactccgtgaagggccgcttcaccatctccagagacaatgccaagaacacgctgtacctccaaatgaacagcctgagagctgaggacacggctgtatatttctgtgcgagatcagccgggaactactggggtgtttttgatatctggggccaagggacaatggtcgccgtctcttcag

SEQ ID NO: 3588 - protein, 120 aa, Artificial Sequence
  Description of Artificial Sequence: Synthetic polypeptide
QVQLVESGGGVVQPGRSLRLSCAASGFTFLSYAMHWVRQAPGKGLEWVAGVSNDGSNEHYADSVKGRFTISRDNAKNTLYLQMNSLRAEDTAVYFCARSAGNYWGVFDIWGQGTMVAVSS

SEQ ID NO: 3589 - protein, 13 aa, Artificial Sequence
  Description of Artificial Sequence: Synthetic peptide
ARSAGNYWGVFDI

SEQ ID NO: 3590 - DNA, 334 bp, Artificial Sequence
  Description of Artificial Sequence: Synthetic polynucleotide
cagtctgtgctgactcagtcgccctctgcctctgcctccctgggagcctcggtcaagctcacctgcactctgagcagtgggcacggcggctacgtcatcgcatggcatcagcagcagccagagaagggccctcgctacttgatgacggttaacagtgatggcagccacaccaagggggacgggatccctgatcgcttctcaggctccggctctggggctgagcgctacctcaccatctccagcctccagtctgaggatgaggctgactattactgtcagacctggggcgctggcaaggaagtgttcggcggagggaccaagctaaccgtcctag

SEQ ID NO: 3591 - protein, 111 aa, Artificial Sequence
  Description of Artificial Sequence: Synthetic polypeptide
QSVLTQSPSASASLGASVKLTCTLSSGHGGYVIAWHQQQPEKGPRYLMTVNSDGSHTKGDGIPDRFSGSGSGAERYLTISSLQSEDEADYYCQTWGAGKEVFGGGTKLTVL

SEQ ID NO: 3592 - protein, 9 aa, Artificial Sequence
  Description of Artificial Sequence: Synthetic peptide
QTWGAGKEV

SEQ ID NO: 3593 - DNA, 352 bp, Artificial Sequence
  Description of Artificial Sequence: Synthetic polynucleotide
caggtgcagctggtggagtctgggggaggcgtggtccagcctgggaggtccctgagactctcctgtgcaggctctggattcaccttcagtcactatgttatgcactgggtccgccaggctccaggcaaggggctagagtgggtgacacttatatcatatgatggaagtaataaatactacgcagactccgtgaagggccgattcatcatctccagagacgattccaagaacacgctgtatctgcaaatgaacagcctgagaggtgacgacacggctgtgtattactgtgcgagaggcccttacggtccttttgactactggggccagggaaccctggtcaccgtctcctcag

SEQ ID NO: 3594 - protein, 117 aa, Artificial Sequence
  Description of Artificial Sequence: Synthetic polypeptide
QVQLVESGGGVVQPGRSLRLSCAGSGFTFSHYVMHWVRQAPGKGLEWVTLISYDGSNKYYADSVKGRFIISRDDSKNTLYLQMNSLRGDDTAVYYCARGPYGPFDYWGQGTLVTVSS

SEQ ID NO: 3595 - protein, 10 aa, Artificial Sequence
  Description of Artificial Sequence: Synthetic peptide
ARGPYGPFDY

SEQ ID NO: 3596 - DNA, 331 bp, Artificial Sequence
  Description of Artificial Sequence: Synthetic polynucleotide
cagtctgccctgactcagcctgcctccgtgtctgggtctcctggacagtcgatcaccatctcctgcactggaaccagcagtgacgttggtggttataactatgtctcctggtatcaacagcacccaggcaaagcccccaaactcatgatttatgaggtcagtaatcggccctcaggggtttctaatcgcttctctggctccaagtctgccaacacggcctccctgaccatctctgggctccaggctgaggacgaggctgattattactgctcctcatatacaagcagcagcacttatgtcttcggaagtgggaccagggtcaccgtcctag

SEQ ID NO: 3597 - protein, 110 aa, Artificial Sequence; identical to SEQ ID NO: 52
  Description of Artificial Sequence: Synthetic polypeptide

SEQ ID NO: 3598 - protein, 10 aa, Artificial Sequence
  Description of Artificial Sequence: Synthetic peptide
SSYTSSSTYV

SEQ ID NO: 3599 - DNA, 349 bp, Artificial Sequence
  Description of Artificial Sequence: Synthetic polynucleotide
caggtgcagctggtgcagtctggggctgaggtgaagaagcctgggtcgtcggtgaaggtctcctgcaagacttctggaggcaacttcaacaactatgcgatcagctgggtgcgtcaggcccctggacaagggcttgagtggatgggggacgtcatccctatctttggcacgccaaactacgcacagaggtttaagggcagagtcacaatttccgcggacagatccacgaccacagcctacatggagctgaacagcctgagatctgatgacacggccgtctattactgtgcgaggggggtctggggctttgactactggggccagggaaccctggtcaccgtctcctcag

SEQ ID NO: 3600 - protein, 116 aa, Artificial Sequence
  Description of Artificial Sequence: Synthetic polypeptide
QVQLVQSGAEVKKPGSSVKVSCKTSGGNFNNYAISWVRQAPGQGLEWMGDVIPIFGTPNYAQRFKGRVTISADRSTTTAYMELNSLRSDDTAVYYCARGVWGFDYWGQGTLVTVSS

SEQ ID NO: 3601 - protein, 9 aa, Artificial Sequence
  Description of Artificial Sequence: Synthetic peptide
ARGVWGFDY

SEQ ID NO: 3602 - DNA, 322 bp, Artificial Sequence
  Description of Artificial Sequence: Synthetic polynucleotide
gaaattgtgttgacgcagtctccaggcaccctgtccttgtctccaggggagagagtcaccgtctcctgcagggccagtcagagtgttaacagcgactacttagcctggtaccagcagaagcctggccagcctcccaggctcctcatctatggtgcatccaccagggccactggcgtcccagacaggttcagtggcagtgggtctgggacagacttcactctcatcatcagcagactggagcctgaagattgtgcagtgtattactgtcagcagtttggtagttcggtcactttcggcggagggaccaaggtggagatcaaac

SEQ ID NO: 3603 - protein, 107 aa, Artificial Sequence
  Description of Artificial Sequence: Synthetic polypeptide
EIVLTQSPGTLSLSPGERVTVSCRASQSVNSDYLAWYQQKPGQPPRLLIYGASTRATGVPDRFSGSGSGTDFTLIISRLEPEDCAVYYCQQFGSSVTFGGGTKVEIK

SEQ ID NO: 3604 - protein, 8 aa, Artificial Sequence
  Description of Artificial Sequence: Synthetic peptide
QQFGSSVT

SEQ ID NO: 3605 - DNA, 364 bp, Artificial Sequence
  Description of Artificial Sequence: Synthetic polynucleotide
caaatgcagctggtgcagtctgggcctgaggtgaagaagcctgggacctcagtgaaggtctcctgcaagacctctggattcaccttcactacctctgctattcagtgggtgcgacaggctcgtggacaacgccctgagtggataggatggatcatcgttggcagtggctacacacactacgcacagaggttccaggaaagagtcaccattaccagggacatttccacaagaacagcctacatggagctgagcagcctgagatccgaggacacggccgtctattattgtgcggcagatatcagagagggatgggggggaccttctgactactggggccagggaaccctggtcaccgtctccacag

SEQ ID NO: 3606 - protein, 121 aa, Artificial Sequence
  Description of Artificial Sequence: Synthetic polypeptide
QMQLVQSGPEVKKPGTSVKVSCKTSGFTFTTSAIQWVRQARGQRPEWIGWIIVGSGYTHYAQRFQERVTITRDISTRTAYMELSSLRSEDTAVYYCAADIREGWGGPSDYWGQGTLVTVST

SEQ ID NO: 3607 - protein, 14 aa, Artificial Sequence
  Description of Artificial Sequence: Synthetic peptide
AADIREGWGGPSDY

SEQ ID NO: 3608 - DNA, 325 bp, Artificial Sequence
  Description of Artificial Sequence: Synthetic polynucleotide
gaaattgtgttgacgcagtctccaggcaccctgtctttgtctccaggggaaagagccaccctctcctgcagggccagtcagagtgtcagcaacagctacgtagcctggtaccagcagaaacctggccaggctcccaggctcctcatctatgctgcatccggcagggccactggcatcccagacaggttcagtggcagtgggtctgggacagacttcactctcaccatcagcagactggcgcctgaggatgttgcagtgtattattgtcagcagtatggaagttcaccactcactttcggcggagggaccaagatagagatcaaac

SEQ ID NO: 3609 - protein, 108 aa, Artificial Sequence
  Description of Artificial Sequence: Synthetic polypeptide
EIVLTQSPGTLSLSPGERATLSCRASQSVSNSYVAWYQQKPGQAPRLLIYAASGRATGIPDRFSGSGSGTDFTLTISRLAPEDVAVYYCQQYGSSPLTFGGGTKIEIK

SEQ ID NO: 3610 - protein, 9 aa, Artificial Sequence
  Description of Artificial Sequence: Synthetic peptide
QQYGSSPLT

SEQ ID NO: 3611 - DNA, 358 bp, Artificial Sequence
  Description of Artificial Sequence: Synthetic polynucleotide
caggtgcagctggtgcagtctggggctgaggtgaagaagcctgggtcctcggtgaaggtctcctgcaaggcttctggaggcaccttcagcaactatgctatcaactgggtgcgacaggcccctggacaagggcttgagtggatgggagggatcatccctacgtttgggacaccaaactacgcgcagaagttccagggcagagtcacgattaccgcgcacgaatccacgaccacagcctacatggagctgagaagcctgagatctgaagacacggccgtgtattactgtgcgagagatctgggttggacccccgggttcgacccctggggccagggaaccctggtcaccgtctcctcag

SEQ ID NO: 3612 - protein, 119 aa, Artificial Sequence
  Description of Artificial Sequence: Synthetic polypeptide
QVQLVQSGAEVKKPGSSVKVSCKASGGTFSNYAINWVRQAPGQGLEWMGGIIPTFGTPNYAQKFQGRVTITAHESTTTAYMELRSLRSEDTAVYYCARDLGWTPGFDPWGQGTLVTVSS

SEQ ID NO: 3613 - protein, 12 aa, Artificial Sequence
  Description of Artificial Sequence: Synthetic peptide
ARDLGWTPGFDP

SEQ ID NO: 3614 - DNA, 334 bp, Artificial Sequence
  Description of Artificial Sequence: Synthetic polynucleotide
gatattgtgatgacccagactccactctctctgtccgtcacccctggacagccggcctccatatcctgcaagtctagtcagagcctcctgcatagtggtggacagacctatttgtattggtacctgcagaagccaggccagcctccacagctcctgatctatgaagtttccaaccggttctctggagtgccagataggttcagtggcagcgggtcagggacagatttcacactgaaaatcagccgggtggaggctgaggatgttggggtttattactgcatgcaaagtacacagctttacacttttggccaggggaccaagctggagatcaaac

SEQ ID NO: 3615 - protein, 111 aa, Artificial Sequence
  Description of Artificial Sequence: Synthetic polypeptide
DIVMTQTPLSLSVTPGQPASISCKSSQSLLHSGGQTYLYWYLQKPGQPPQLLIYEVSNRFSGVPDRFSGSGSGTDFTLKISRVEAEDVGVYYCMQSTQLYTFGQGTKLEIK

SEQ ID NO: 3616 - protein, 8 aa, Artificial Sequence
  Description of Artificial Sequence: Synthetic peptide
MQSTQLYT

SEQ ID NO: 3617 - DNA, 396 bp, Artificial Sequence
  Description of Artificial Sequence: Synthetic polynucleotide
caggtgcagctggtgcagtctggggctgagcttaagaaacctgggtcctcggtaaaagtttcctgcaaggcttctggaggcatcttcagcagccatgccatcagctgggtgcgtcaggcccctggacaagggcttgagtggattggagggatcatccctaggtttgatgtatccaactacgcaccgcaattccagggcagagtcacgattatcgcggacaaatccacgaccacagcccacttggaactgagcagcctgagatctgaggacacggccctttattattgtgcgagagcatcctatgatagtagtggtaattactacgccggagcccctttctactacttctaccatatggacgtctggggccaagggaccacggtcaccgtctcctca

SEQ ID NO: 3618 - protein, 132 aa, Artificial Sequence
  Description of Artificial Sequence: Synthetic polypeptide
QVQLVQSGAELKKPGSSVKVSCKASGGIFSSHAISWVRQAPGQGLEWIGGIIPRFDVSNYAPQFQGRVTIIADKSTTTAHLELSSLRSEDTALYYCARASYDSSGNYYAGAPFYYFYHMDVWGQGTTVTVSS

SEQ ID NO: 3619 - protein, 25 aa, Artificial Sequence
  Description of Artificial Sequence: Synthetic peptide
ARASYDSSGNYYAGAPFYYFYHMDV

SEQ ID NO: 3620 - DNA, 340 bp, Artificial Sequence
  Description of Artificial Sequence: Synthetic polynucleotide
gacatcgtgatgacccagtctccagactccctggctgtgtctctgggcgagagggccaccatcaagtgcaagtccagccagaatttattatacacctccaacaataagaactacttagcctggtaccagcagaaaccaggacagcctcctaaactactcttttcctgggcctctacccgggaatccggggtccctgaccgattcagcggcagcgggtctgggacagatttcactctcaccatcagcagcctgcgggctgaagatgtggcactttatttctgtcagcaatattctactactcctcccacttttggccaggggaccaagctggtcatcaaac

SEQ ID NO: 3621 - protein, 113 aa, Artificial Sequence
  Description of Artificial Sequence: Synthetic polypeptide
DIVMTQSPDSLAVSLGERATIKCKSSQNLLYTSNNKNYLAWYQQKPGQPPKLLFSWASTRESGVPDRFSGSGSGTDFTLTISSLRAEDVALYFCQQYSTTPPTFGQGTKLVIK

SEQ ID NO: 3622 - protein, 9 aa, Artificial Sequence
  Description of Artificial Sequence: Synthetic peptide
QQYSTTPPT

SEQ ID NO: 3623 - DNA, 349 bp, Artificial Sequence
  Description of Artificial Sequence: Synthetic polynucleotide
caggtgcagctggtgcagtctggggctgaggtgaagaaacctgggtcctcggtgaaggtctcctgcgaggcgtctggaggcaccttcagcaactatggtatcaactgggtgcgacaggcccctggacaacggcttgagtggatgggagagatcatccctgtctttggcacagcaaattacgcacagaagttccagggcagagtcacgattaccgcggacagatccacgagcacagcctacatggagctgcacggccttagaatcgacgacacggccctttattactgtgcgagaggagtgtggggttgggactactggggccagggaacccaggtcaccgtctcctcag

SEQ ID NO: 3624 - protein, 116 aa, Artificial Sequence
  Description of Artificial Sequence: Synthetic polypeptide
QVQLVQSGAEVKKPGSSVKVSCEASGGTFSNYGINWVRQAPGQRLEWMGEIIPVFGTANYAQKFQGRVTITADRSTSTAYMELHGLRIDDTALYYCARGVWGWDYWGQGTQVTVSS

SEQ ID NO: 3625 - protein, 9 aa, Artificial Sequence
  Description of Artificial Sequence: Synthetic peptide
ARGVWGWDY

SEQ ID NO: 3626 - DNA, 325 bp, Artificial Sequence
  Description of Artificial Sequence: Synthetic polynucleotide
gaaattgtgttgacgcagtctccaggcaccctgtctttgtctccaggggacagagccaccctctcctgcagggccagtcagagtgttaacagcgactactttgcctggtaccagcagaaacctggccaggctccccgcctcctcatctatggtacatccaccagggccactggcatcccagacaggttcagtggcagtgggtctgggacagacttcactctcactatcaccagactggagcctgaagattttgcagtgtattactgtcagcagtatggtagctcacctcggacgttcggccaagggaccaacgtggaaatcaaac

SEQ ID NO: 3627 - protein, 108 aa, Artificial Sequence
  Description of Artificial Sequence: Synthetic polypeptide
EIVLTQSPGTLSLSPGDRATLSCRASQSVNSDYFAWYQQKPGQAPRLLIYGTSTRATGIPDRFSGSGSGTDFTLTITRLEPEDFAVYYCQQYGSSPRTFGQGTNVEIK

SEQ ID NO: 3628 - protein, 9 aa, Artificial Sequence
  Description of Artificial Sequence: Synthetic peptide
QQYGSSPRT

SEQ ID NO: 3629 - DNA, 355 bp, Artificial Sequence
  Description of Artificial Sequence: Synthetic polynucleotide
caggtgcagctggtgcagtctggggctgaggtgaagaagcctgggtcctcggtgaaggtctcctgcaaggcttctggaggcaccttcagccactttgccatcagctgggtgcgacaggcccctggacaagggcttgagtgggtgggcgacatcatccctctctttgctacaccgaactacgcacagaagttccgggacagagtcacgatttccgcggacgaatccacggccacagcctacatggaggtgagcagcctgagatctgacgacacggccgtctatttctgtgcgcgagatgatggttcggcgagttacgcctactggggccagggaaccctggtcagcgtctcctcag

SEQ ID NO: 3630 - protein, 118 aa, Artificial Sequence
  Description of Artificial Sequence: Synthetic polypeptide
QVQLVQSGAEVKKPGSSVKVSCKASGGTFSHFAISWVRQAPGQGLEWVGDIIPLFATPNYAQKFRDRVTISADESTATAYMEVSSLRSDDTAVYFCARDDGSASYAYWGQGTLVSVSS

SEQ ID NO: 3631 - protein, 11 aa, Artificial Sequence
  Description of Artificial Sequence: Synthetic peptide
ARDDGSASYAY

SEQ ID NO: 3632 - DNA, 337 bp, Artificial Sequence
  Description of Artificial Sequence: Synthetic polynucleotide
gatattgtgatgactcagtctccactctccctgcccgtcacccctggagagccggcctccatctcctgcaggtctagtcagagcctcctgcataggagtggattcacctatttggattggtacctgcagaagccagggcagtctccacagctcctgatctatttgggttctaatcgggcctccggggtccctgacagattcagtggcagtggatcaggcacagattttacactgaaaatcagtagagtggaggctgaggatgttggggtttattactgcatgcaggctctgcaaactcctcgaacttttggccaggggaccaagctggagatcaaac

SEQ ID NO: 3633 - protein, 112 aa, Artificial Sequence
  Description of Artificial Sequence: Synthetic polypeptide
DIVMTQSPLSLPVTPGEPASISCRSSQSLLHRSGFTYLDWYLQKPGQSPQLLIYLGSNRASGVPDRFSGSGSGTDFTLKISRVEAEDVGVYYCMQALQTPRTFGQGTKLEIK

SEQ ID NO: 3634 - protein, 9 aa, Artificial Sequence
  Description of Artificial Sequence: Synthetic peptide
MQALQTPRT

SEQ ID NO: 3635 - DNA, 361 bp, Artificial Sequence
  Description of Artificial Sequence: Synthetic polynucleotide
caggtgcagctggtggagtctgggggaggcgtggtccagcctgggaggtccctgagactctcctgtgcagcctctggattcatcttcagtaactgtggcatgcactgggtccgccaggctccaggcaaggggctggaatgggtggcggttgtttcatatgatggaagtgataagtcgtatggagagtccgtgaagggccgattcaccatctccagagacaattccaagaacacagtgcatctgcaaatgaacagcctgagagcagaggacacggctgtgtatttttgtgcgaagggggaaacagttatcgaccccctctttgactactggggccagggaattctggtcaccgtctcctcag

SEQ ID NO: 3636 - protein, 120 aa, Artificial Sequence
  Description of Artificial Sequence: Synthetic polypeptide
QVQLVESGGGVVQPGRSLRLSCAASGFIFSNCGMHWVRQAPGKGLEWVAVVSYDGSDKSYGESVKGRFTISRDNSKNTVHLQMNSLRAEDTAVYFCAKGETVIDPLFDYWGQGILVTVSS

SEQ ID NO: 3637 - protein, 13 aa, Artificial Sequence
  Description of Artificial Sequence: Synthetic peptide
AKGETVIDPLFDY

SEQ ID NO: 3638 - DNA, 319 bp, Artificial Sequence
  Description of Artificial Sequence: Synthetic polynucleotide
gaaatagtgatgacgcagtctccagccaccctgtctgtgtctccaggggaaagagtcaccctctcctgcagggccagtcagagtgttagcagcaacttagcctggtaccagcagaaacctggccaggctcccaggctcctcatctctcgtgcatccaccagggccactggtatcccagccaggttcagtggcagtgggtctgggacagagttcactctcaccatcagcagcctgcagtctgaagattttgcagtttatttctgtcagcagtatgattactggcctcccaccttcggccaagggacacgactcgatatta

SEQ ID NO: 3639 - protein, 106 aa, Artificial Sequence
  Description of Artificial Sequence: Synthetic polypeptide
EIVMTQSPATLSVSPGERVTLSCRASQSVSSNLAWYQQKPGQAPRLLISRASTRATGIPARFSGSGSGTEFTLTISSLQSEDFAVYFCQQYDYWPPTFGQGTRLDI

SEQ ID NO: 3640 - protein, 9 aa, Artificial Sequence
  Description of Artificial Sequence: Synthetic peptide
QQYDYWPPT

SEQ ID NO: 3641 - DNA, 355 bp, Artificial Sequence
  Description of Artificial Sequence: Synthetic polynucleotide
caggtgcagctggtgcagtctggggctgaggtgaagaagcctgggtcctcggtgagggtctcctgcaaggcttctggaggcaccttcagcaactatgaaatcgcctgggttcggcaggcccctggacaagggctagagtggatgggacggatcatccctgtctttgggacaccaagctacgcacagaagttccagggcagagtcacgattagtgcggacatttctacgagcacggcctacatggagctgagcagcctgagatctgaggacacggccgtgtatttctgtgcgagagatggaggtttggggagttatgactactggggccagggaaccctggtcaccgtctcctcag

SEQ ID NO: 3642 - protein, 118 aa, Artificial Sequence
  Description of Artificial Sequence: Synthetic polypeptide
QVQLVQSGAEVKKPGSSVRVSCKASGGTFSNYEIAWVRQAPGQGLEWMGRIIPVFGTPSYAQKFQGRVTISADISTSTAYMELSSLRSEDTAVYFCARDGGLGSYDYWGQGTLVTVSS

SEQ ID NO: 3643 - protein, 11 aa, Artificial Sequence
  Description of Artificial Sequence: Synthetic peptide
ARDGGLGSYDY

SEQ ID NO: 3644 - DNA, 337 bp, Artificial Sequence
  Description of Artificial Sequence: Synthetic polynucleotide
gatattgtgatgactcagtctccactctccctgcccgtcacccctggagagccggcctccatctcctgcaggtctagtcagagcctcctgcatagaaatggagacaactatttggattggtacctgcagaagccagggcagtctccacaactcctgatctatatgggttcttatcgggcctccggggtccctgacaggttcagtggcagtggatcaggcacagattttacactgaaaatcagtagagtggaggctgaggatgttggggtttattactgcatgcaagctctacaaagtcctcgctcttttggccaggggaccaagctggagatcaaac

SEQ ID NO: 3645 - protein, 112 aa, Artificial Sequence
  Description of Artificial Sequence: Synthetic polypeptide
DIVMTQSPLSLPVTPGEPASISCRSSQSLLHRNGDNYLDWYLQKPGQSPQLLIYMGSYRASGVPDRFSGSGSGTDFTLKISRVEAEDVGVYYCMQALQSPRSFGQGTKLEIK

SEQ ID NO: 3646 - protein, 9 aa, Artificial Sequence
  Description of Artificial Sequence: Synthetic peptide
MQALQSPRS

SEQ ID NO: 3647 - DNA, 355 bp, Artificial Sequence
  Description of Artificial Sequence: Synthetic polynucleotide
caggtgcagctggtgcagtctggggctgaggtgaagaagcctgggtcctcggtgaaggtctcctgcaaggcttctggaggcaccttcagcaactatgcaatcaactgggtgcgacaggcccctggacaagggcttgagtggatgggaggaatcatacctctgtttgctacaccaaagtacgcacagaagttccagggcagagtcacaattaccgcggacgaatccacgagcactgcctacatggagctgagcagtctaaaatctgaagacacggccatatattactgtacgagagatggaggtgtgtcacttcttgactactggggccagggaaccctggtcaccgtctcctcag

SEQ ID NO: 3648 - protein, 118 aa, Artificial Sequence
  Description of Artificial Sequence: Synthetic polypeptide
QVQLVQSGAEVKKPGSSVKVSCKASGGTFSNYAINWVRQAPGQGLEWMGGIIPLFATPKYAQKFQGRVTITADESTSTAYMELSSLKSEDTAIYYCTRDGGVSLLDYWGQGTLVTVSS

SEQ ID NO: 3649 - protein, 11 aa, Artificial Sequence
  Description of Artificial Sequence: Synthetic peptide
TRDGGVSLLDY

SEQ ID NO: 3650 - DNA, 337 bp, Artificial Sequence
  Description of Artificial Sequence: Synthetic polynucleotide
gatattgtgatgactcagtctccactctccctgcccgtcacccctggagagccggcctccatctcctgcaggtctagtcagagcctcctgcatagaactggatacacctatttgcaatggtacctgcagaagccagggcagtctccacagctcctgatctatttgggttctagtcgggcctccggggtccctgacaggttcagtggcagtggatcaggcacagattttacactgataatcagtagagtggaggctgaggatgttggggtttactactgcatgcaagctctacaaaccccgtacacttttggccaggggaccaagctggagatcaaac

SEQ ID NO: 3651 - protein, 112 aa, Artificial Sequence
  Description of Artificial Sequence: Synthetic polypeptide
DIVMTQSPLSLPVTPGEPASISCRSSQSLLHRTGYTYLQWYLQKPGQSPQLLIYLGSSRASGVPDRFSGSGSGTDFTLIISRVEAEDVGVYYCMQALQTPYTFGQGTKLEIK

SEQ ID NO: 3652 - protein, 9 aa, Artificial Sequence
  Description of Artificial Sequence: Synthetic peptide
MQALQTPYT

SEQ ID NO: 3653 - DNA, 364 bp, Artificial Sequence
  Description of Artificial Sequence: Synthetic polynucleotide
caggtgcagctggtggagtctgggggaggcgtggtccagcctgggaggtccctgagactctcgtgtgcagcctctggattcaccttcagtacctatgccatgcactgggtccgccaggctccaggcaaggggctggagtgggtggcagttatttcagatgatggaagccaaaaagaatatgcagactccgtgaagggccgattcaccatctccagagacaattccaagaacacactgtatgtgcaaatgaacagcctgagagctgaggacacggctgtatattactgtgcgaaagatcccagtggctgggtcgacaactggctcgactcctggggccagggaatcctggttaccgtctcctcag

SEQ ID NO: 3654 - protein, 121 aa, Artificial Sequence
  Description of Artificial Sequence: Synthetic polypeptide
QVQLVESGGGVVQPGRSLRLSCAASGFTFSTYAMHWVRQAPGKGLEWVAVISDDGSQKEYADSVKGRFTISRDNSKNTLYVQMNSLRAEDTAVYYCAKDPSGWVDNWLDSWGQGILVTVSS

SEQ ID NO: 3655 - protein, 14 aa, Artificial Sequence
  Description of Artificial Sequence: Synthetic peptide
AKDPSGWVDNWLDS

SEQ ID NO: 3656 - DNA, 322 bp, Artificial Sequence
  Description of Artificial Sequence: Synthetic polynucleotide
gaaatagtgatgacgcagtctccagccaccctgtctgtgtctccaggggaaagagccaccctctcctgcagggccagtcagagtgttagcaacaacttagcctggtaccagcagaaacctggccagactcccaggctcctcatctatggtgcatccaccagggcctctggtgtcccagccaggttcagtggcagtgggtctgggacagagttcactttcaccatcagcagcctgcagtctgaagattttgcattttattactgtcagcagtatgattactggcctctcactttcggccctgggaccaaagtggatatcaaac

SEQ ID NO: 3657 - protein, 107 aa, Artificial Sequence
  Description of Artificial Sequence: Synthetic polypeptide
EIVMTQSPATLSVSPGERATLSCRASQSVSNNLAWYQQKPGQTPRLLIYGASTRASGVPARFSGSGSGTEFTFTISSLQSEDFAFYYCQQYDYWPLTFGPGTKVDIK

SEQ ID NO: 3658 - protein, 9 aa, Artificial Sequence
  Description of Artificial Sequence: Synthetic peptide
QQYDYWPLT

SEQ ID NO: 3659 - DNA, 370 bp, Artificial Sequence
  Description of Artificial Sequence: Synthetic polynucleotide
caggtgcagctgcaggagtcgggcccaggactggtgaagccttcacagaccctgtccctcacctgcactgtctctggtggctccatcagcagtgatggttactactggagctggatccgccagcacccagggaagggcctggagtggattgggaacatctataacagtgggagcacctactacaacccgtccctcaagagtcgagttaccatatcaatagacacgtctaagaaccagttctccctgaagctgagctctgtgactgccgcggacacggccgtgtattactgtgcgagatattactatggttcggggagttactcgaactttgactactggggccagggaaccctggtcaccgtctcctcag

SEQ ID NO: 3660 - protein, 123 aa, Artificial Sequence
  Description of Artificial Sequence: Synthetic polypeptide
QVQLQESGPGLVKPSQTLSLTCTVSGGSISSDGYYWSWIRQHPGKGLEWIGNIYNSGSTYYNPSLKSRVTISIDTSKNQFSLKLSSVTAADTAVYYCARYYYGSGSYSNFDYWGQGTLVTVSS

SEQ ID NO: 3661 - protein, 15 aa, Artificial Sequence
  Description of Artificial Sequence: Synthetic peptide
ARYYYGSGSYSNFDY

SEQ ID NO: 3662 - DNA, 322 bp, Artificial Sequence
  Description of Artificial Sequence: Synthetic polynucleotide
gaaattgtgttgacacagtctccagccaccctgtctttgtctccaggggaaagagccagcctctcctgcagggccagtcagagtgttagcagctacttagcctggtaccagcagaaacctggccaggctcccaggctcctcttctatgatgcatcgaacagggccactggcatcccagccaggttcagtggcagtgggtctgggacagacttcactctcaccatcagcagcctagagcctgaagatattgcagtttattactgtcagcagcgtaccaactggcagatcaccttcggccaagggacacgactggagattaaac

SEQ ID NO: 3663 - protein, 107 aa, Artificial Sequence
  Description of Artificial Sequence: Synthetic polypeptide
EIVLTQSPATLSLSPGERASLSCRASQSVSSYLAWYQQKPGQAPRLLFYDASNRATGIPARFSGSGSGTDFTLTISSLEPEDIAVYYCQQRTNWQITFGQGTRLEIK

SEQ ID NO: 3664 - protein, 9 aa, Artificial Sequence
  Description of Artificial Sequence: Synthetic peptide
QQRTNWQIT

SEQ ID NO: 3665 - DNA, 352 bp, Artificial Sequence
  Description of Artificial Sequence: Synthetic polynucleotide
caggtgcagctggtgcagtctggggctgaggtgaagaagcctgggtcctcggtgaaggtctcctgcaaggcttctggaggcaccttcagcaactatgctatcagctgggtgcgacaggcccctggacaagggcttgagtggatgggagggatcatccctatctttggtacaccaaactacgcacagaagttccagggcagagtcacgattaccgcggacaaatccacgagcacagcctacatggagctgagcagcctgacatctcaggacacggccgtgtattactgtgcgagagatagcctggagctactggtctactggggccagggaaccctggtcaccgtctcctcag

SEQ ID NO: 3666 - protein, 117 aa, Artificial Sequence
  Description of Artificial Sequence: Synthetic polypeptide
QVQLVQSGAEVKKPGSSVKVSCKASGGTFSNYAISWVRQAPGQGLEWMGGIIPIFGTPNYAQKFQGRVTITADKSTSTAYMELSSLTSQDTAVYYCARDSLELLVYWGQGTLVTVSS

SEQ ID NO: 3667 - protein, 10 aa, Artificial Sequence
  Description of Artificial Sequence: Synthetic peptide
ARDSLELLVY

SEQ ID NO: 3668 - DNA, 337 bp, Artificial Sequence
  Description of Artificial Sequence: Synthetic polynucleotide
gatattgtgatgacccagactccactctcctcacctgtcacccttggacagccggcctccatctcctgcaggtctagtcaaagcctcgtacacagggatggaaacacctacttgagttggcttcagcagaggccaggccagcctccaagactcctaatttataagatttctaaccggttctctggggtcccagacagattcagtggcagtggggcagggacagatttcacactgaaaatcagtagggtggaagctgaggatgtcggggtttattactgcatgcaagctacacaatttcctctcactttcggcggagggaccaaggtggagatcaaac

SEQ ID NO: 3669 - protein, 112 aa, Artificial Sequence
  Description of Artificial Sequence: Synthetic polypeptide
DIVMTQTPLSSPVTLGQPASISCRSSQSLVHRDGNTYLSWLQQRPGQPPRLLIYKISNRFSGVPDRFSGSGAGTDFTLKISRVEAEDVGVYYCMQATQFPLTFGGGTKVEIK

SEQ ID NO: 3670 - protein, 9 aa, Artificial Sequence
  Description of Artificial Sequence: Synthetic peptide
MQATQFPLT

SEQ ID NO: 3671 - DNA, 355 bp, Artificial Sequence; identical to SEQ ID NO: 129
  Description of Artificial Sequence: Synthetic polynucleotide

SEQ ID NO: 3672 - protein, 118 aa, Artificial Sequence; identical to SEQ ID NO: 11
  Description of Artificial Sequence: Synthetic polypeptide

SEQ ID NO: 3673 - protein, 11 aa, Artificial Sequence
  Description of Artificial Sequence: Synthetic peptide
AREDGLGSYDD

SEQ ID NO: 3674 - DNA, 337 bp, Artificial Sequence; identical to SEQ ID NO: 130
  Description of Artificial Sequence: Synthetic polynucleotide

SEQ ID NO: 3675 - protein, 112 aa, Artificial Sequence; identical to SEQ ID NO: 12
  Description of Artificial Sequence: Synthetic polypeptide

SEQ ID NO: 3676 - protein, 9 aa, Artificial Sequence
  Description of Artificial Sequence: Synthetic peptide
MQALQTPRT

SEQ ID NO: 3677 - DNA, 361 bp, Artificial Sequence
  Description of Artificial Sequence: Synthetic polynucleotide
caggtgcagctggtgcagtctggggctgaggtgaagaagcctgggtcctcggtgaaactctcctgcaaggcttctggagacaccttcagcaactatggtatcaactgggtgcgacaggcccctggacaagggcttgaatggatgggagcgataatccctttttttggtacatcaaactacgcacagaagttccagggcagagtcacgattaccgcggacaaatccacgagcacagcctacatggagctgagcagtgtgagatctgaggacacggccgtgtattattgtgcgagatgtggtggtgcctgcgcttggggatttgactactggggccagggatccctggtcaccgtctcctcag

SEQ ID NO: 3678 - protein, 120 aa, Artificial Sequence
  Description of Artificial Sequence: Synthetic polypeptide
QVQLVQSGAEVKKPGSSVKLSCKASGDTFSNYGINWVRQAPGQGLEWMGAIIPFFGTSNYAQKFQGRVTITADKSTSTAYMELSSVRSEDTAVYYCARCGGACAWGFDYWGQGSLVTVSS

SEQ ID NO: 3679 - protein, 13 aa, Artificial Sequence
  Description of Artificial Sequence: Synthetic peptide
ARCGGACAWGFDY

SEQ ID NO: 3680 - DNA, 322 bp, Artificial Sequence
  Description of Artificial Sequence: Synthetic polynucleotide
gacatccagttgacccagtctccatccttcctgtctgcatctgtaggagacagagtcaccatcacttgccgggccagtcagggcattagtagttatttagcctggtatcagcaaaaaccagggagagcccctaagctcctgatctatgctgcatccactttgaaaagtggggtcccatcaaggttcagcggcagtgaatctgagacagaattcattctcacaatcagcagcctgcagcctgaagattttgcaacttattactgtcaacagcttaatagttacccgtacacttttggccaggggaccaagctggagatcaaac

SEQ ID NO: 3681 - protein, 107 aa, Artificial Sequence
  Description of Artificial Sequence: Synthetic polypeptide
DIQLTQSPSFLSASVGDRVTITCRASQGISSYLAWYQQKPGRAPKLLIYAASTLKSGVPSRFSGSESETEFILTISSLQPEDFATYYCQQLNSYPYTFGQGTKLEIK

SEQ ID NO: 3682 - protein, 9 aa, Artificial Sequence
  Description of Artificial Sequence: Synthetic peptide
QQLNSYPYT

SEQ ID NO: 3683 - DNA, 364 bp, Artificial Sequence
  Description of Artificial Sequence: Synthetic polynucleotide
caggtgcagctggtggagtctgggggaggcgtggtccagcctgggaggtccctgagactctcctgtgcagcctctggattcaccttcagtagctatggcatgcactgggtccgccaggctccaggcaaggggctggagtgggtggcagttatatcatatgatggaagtaataaggactatgcagactccgtgaagggccgattcaccatctccagagacaattccaagaacacgctgtatctgcaaatgaacagcctgagagctgaggacacggctgtctattattgtgcgaaagatcccgccagctgggtagacaactggttcgacccctggggccagggaaccctggtcaccgtctcctcag

SEQ ID NO: 3684 - protein, 121 aa, Artificial Sequence
  Description of Artificial Sequence: Synthetic polypeptide
QVQLVESGGGVVQPGRSLRLSCAASGFTFSSYGMHWVRQAPGKGLEWVAVISYDGSNKDYADSVKGRFTISRDNSKNTLYLQMNSLRAEDTAVYYCAKDPASWVDNWFDPWGQGTLVTVSS

SEQ ID NO: 3685 - protein, 14 aa, Artificial Sequence
  Description of Artificial Sequence: Synthetic peptide
AKDPASWVDNWFDP

SEQ ID NO: 3686 - DNA, 322 bp, Artificial Sequence
  Description of Artificial Sequence: Synthetic polynucleotide
gaaatagtgatgacgcagtctccagccaccctgtctgtgtctccaggggaaagagccaccctctcctgcagggccagtcagagtgttagcagcaacttagcctggtaccagcagaaacctggccaggctcccaggctcctcatctatggtgcatccaccagggccactggcatcccagccaggttcagtggcagtgggtctgggacagagttcactctcaccatcagcagcctgcagtctgaagattttgcagtttattactgtcagcagtataataactggccgctcactttcggcggagggaccaaggtggagatcaaac

SEQ ID NO: 3687 - protein, 107 aa, Artificial Sequence
  Description of Artificial Sequence: Synthetic polypeptide
EIVMTQSPATLSVSPGERATLSCRASQSVSSNLAWYQQKPGQAPRLLIYGASTRATGIPARFSGSGSGTEFTLTISSLQSEDFAVYYCQQYNNWPLTFGGGTKVEIK

SEQ ID NO: 3688 - protein, 9 aa, Artificial Sequence
  Description of Artificial Sequence: Synthetic peptide
QQYNNWPLT

SEQ ID NO: 3689 - DNA, 355 bp, Artificial Sequence
  Description of Artificial Sequence: Synthetic polynucleotide
caggtgcagctggtgcagtctggggctgaggtgaagaagcctgggtcctcggtgaaggtctcctgcaaggcttctggaggaatcttcagtaactatgctatcaactgggtgcggcaggcccctggacaagggcctgagtggatgggacggatcatccctgtctttattacaccagactacgcacagaagttccagggcagagtcacgattactgcggacgaatccacgagcacagcctacatggagctgagcagcctgagatctgaggacacggccgtgtattactgtgcgagagacggtggaatggggagttacgactactggggccagggaaccttggtcaccgtctcctcag

SEQ ID NO: 3690 - protein, 118 aa, Artificial Sequence
  Description of Artificial Sequence: Synthetic polypeptide
QVQLVQSGAEVKKPGSSVKVSCKASGGIFSNYAINWVRQAPGQGPEWMGRIIPVFITPDYAQKFQGRVTITADESTSTAYMELSSLRSEDTAVYYCARDGGMGSYDYWGQGTLVTVSS

SEQ ID NO: 3691 - protein, 11 aa, Artificial Sequence
  Description of Artificial Sequence: Synthetic peptide
ARDGGMGSYDY

SEQ ID NO: 3692 - DNA, 337 bp, Artificial Sequence
  Description of Artificial Sequence: Synthetic polynucleotide
gatattgtgatgactcagtctccactctccctgcccgtcacccctggagagccggcctccatctcctgcaggtctagtcagagcctccggcatagggatggaaacaactatttggattggtacctgcagaagccagggcagtctccacagctcctgatctatttgggttctaatcgggcctccggggtccctgacaggttcagtggcagtgggtcaggcacagattttacactgagaatcagcagagtggaggctgaggatgttgggatttattactgcatgcaacctctacaaactcctcacacttttggccaggggaccaagctggagatcaaac

SEQ ID NO: 3693 - protein, 112 aa, Artificial Sequence
  Description of Artificial Sequence: Synthetic polypeptide
DIVMTQSPLSLPVTPGEPASISCRSSQSLRHRDGNNYLDWYLQKPGQSPQLLIYLGSNRASGVPDRFSGSGSGTDFTLRISRVEAEDVGIYYCMQPLQTPHTFGQGTKLEIK

SEQ ID NO: 3694 - protein, 9 aa, Artificial Sequence
  Description of Artificial Sequence: Synthetic peptide
MQPLQTPHT

SEQ ID NO: 3695 - DNA, 355 bp, Artificial Sequence
  Description of Artificial Sequence: Synthetic polynucleotide
caggtgcagctggtgcagtctggggctgaggtgaagaagcctgggtcctcggtgaaggtctcctgcaaggtttctggaggcaacttcaacaattatgatattagttgggtgcgacaggcccctggacaagggcttgagtggatgggagggatcatccctatcttcggtacagcaaactacgcacagaagttccaggccagactcacgatctccgcggacgaatccacgagcacagcctacatggagctgagcagcctaaggtgtgaagacacggccgtgtattactgtgcgagagatgatggtttggggagtcatggttactggggccagggaaccctggtcaccgtctcctcag

SEQ ID NO: 3696 - protein, 118 aa, Artificial Sequence
  Description of Artificial Sequence: Synthetic polypeptide
QVQLVQSGAEVKKPGSSVKVSCKVSGGNFNNYDISWVRQAPGQGLEWMGGIIPIFGTANYAQKFQARLTISADESTSTAYMELSSLRCEDTAVYYCARDDGLGSHGYWGQGTLVTVSS

SEQ ID NO: 3697 - protein, 11 aa, Artificial Sequence
  Description of Artificial Sequence: Synthetic peptide
ARDDGLGSHGY

SEQ ID NO: 3698 - DNA, 337 bp, Artificial Sequence
  Description of Artificial Sequence: Synthetic polynucleotide
gatattgtgatgactcagtctccactctccctgcccgtcacccctggagagccggcctccatctcctgcaggtctactcagagcctcctgcatagaactggattcaactatttggattggtacctgcagaagccagggcagtctccacaactcctgatctatttgggttctaatcgggcctccggggtccctgacaggttcagtggcagtggatcaggcacatattttacactgaaaatcagcagagtggaggctgaggatgttggggtttattactgcatgcaagctctacaaactcctcgaacttttggccaggggaccaagctggagatcaaac

SEQ ID NO: 3699 - protein, 112 aa, Artificial Sequence
  Description of Artificial Sequence: Synthetic polypeptide
DIVMTQSPLSLPVTPGEPASISCRSTQSLLHRTGFNYLDWYLQKPGQSPQLLIYLGSNRASGVPDRFSGSGSGTYFTLKISRVEAEDVGVYYCMQALQTPRTFGQGTKLEIK

SEQ ID NO: 3700 - protein, 9 aa, Artificial Sequence
  Description of Artificial Sequence: Synthetic peptide
MQALQTPRT

SEQ ID NO: 3701 - DNA, 349 bp, Artificial Sequence
  Description of Artificial Sequence: Synthetic polynucleotide
caggtgcagctggtgcagtctggggctgaggtgaagaagcctgggtcctcggtgaaggtctcctgcaaggcatctggaggcaccttcagcaactatgctatcagttgggtgcgccaggcccctggacaagggcttgagtggatgggagatatcatccctatctttggcacaccaaactacgcacagaagtttcggggcagagtcatcattaccgcggacgaatccacgagaacagcctacatggagttgaacagcctgagatctgaggacacggccgtttattactgtgcgagaggtgtctggggatatgactactggggccagggaaccctggtcaccgtctcctcag

SEQ ID NO: 3702 - protein, 116 aa, Artificial Sequence
  Description of Artificial Sequence: Synthetic polypeptide
QVQLVQSGAEVKKPGSSVKVSCKASGGTFSNYAISWVRQAPGQGLEWMGDIIPIFGTPNYAQKFRGRVIITADESTRTAYMELNSLRSEDTAVYYCARGVWGYDYWGQGTLVTVSS

SEQ ID NO: 3703 - protein, 9 aa, Artificial Sequence
  Description of Artificial Sequence: Synthetic peptide
ARGVWGYDY

SEQ ID NO: 3704 - DNA, 322 bp, Artificial Sequence
  Description of Artificial Sequence: Synthetic polynucleotide
gaaattgtgttgacgcagtctccaggcaccctgtctttgtctccaggggaaagagccaccctctcctgcagggccagtcagagtcttgacagcgactacttagcctggtaccaacagaaacctggccaggctcccaggctcctcatctatggtgcatccaccagggccactggcatcccagacaggttcagtggcagtgggtctgcgacagacttcattctcaccatcagaagactggagcctgaagattttgcagtctattactgtcagcattatggtacctcaccgacgttcggccaagggaccaaggtggaaatcaaac

SEQ ID NO: 3705 - protein, 107 aa, Artificial Sequence
  Description of Artificial Sequence: Synthetic polypeptide
EIVLTQSPGTLSLSPGERATLSCRASQSLDSDYLAWYQQKPGQAPRLLIYGASTRATGIPDRFSGSGSATDFILTIRRLEPEDFAVYYCQHYGTSPTFGQGTKVEIK

SEQ ID NO: 3706 - protein, 8 aa, Artificial Sequence
  Description of Artificial Sequence: Synthetic peptide
QHYGTSPT

SEQ ID NO: 3707 - DNA, 355 bp, Artificial Sequence
  Description of Artificial Sequence: Synthetic polynucleotide
caggtgcagctggtgcagtctggggctgaggtgaagaagcctgggtcctcggtgaaggtctcctgcaaggcctctgggggcaccatcagcaactatcctatcatctgggtgcgacaggcccctggacaagggcttgaatggatgggcgggatcatccctgtctttggtacaccaaactacgcacagaagttccaggacagagtcaccattaccgcggacaaatccacgagcacagcctacatggagctgagcagcctaacatctgatgacacggccgtatattactgtgcgagagggagtgcctatggtgactacaactattggggccagggaaccctggtcaccgtctcctcag

SEQ ID NO: 3708 - protein, 118 aa, Artificial Sequence
  Description of Artificial Sequence: Synthetic polypeptide
QVQLVQSGAEVKKPGSSVKVSCKASGGTISNYPIIWVRQAPGQGLEWMGGIIPVFGTPNYAQKFQDRVTITADKSTSTAYMELSSLTSDDTAVYYCARGSAYGDYNYWGQGTLVTVSS

SEQ ID NO: 3709 - protein, 11 aa, Artificial Sequence
  Description of Artificial Sequence: Synthetic peptide
ARGSAYGDYNY

SEQ ID NO: 3710 - DNA, 325 bp, Artificial Sequence
  Description of Artificial Sequence: Synthetic polynucleotide
gacatccagatgacccagtctccatcctccctgtctgcatctgtaggagacagagtcaccatcacttgccaggcgagtcaagacatttccaactatttaaattggttgcagcaaaaaccagggaaagcccctaaactcctgatctacgatgcatccaatttggaaacaggggtctcatcaaggttcagtggaagtggatctgggacagattttactttcaccatcagcagccttcagcctgaagatattgcaacatattactgtcaacgttatgataatctcccctcgctcactttcggcggagggaccaaggtggagatcaaac

SEQ ID NO: 3711 - protein, 108 aa, Artificial Sequence
  Description of Artificial Sequence: Synthetic polypeptide
DIQMTQSPSSLSASVGDRVTITCQASQDISNYLNWLQQKPGKAPKLLIYDASNLETGVSSRFSGSGSGTDFTFTISSLQPEDIATYYCQRYDNLPSLTFGGGTKVEIK

SEQ ID NO: 3712 - protein, 10 aa, Artificial Sequence
  Description of Artificial Sequence: Synthetic peptide
QRYDNLPSLT

SEQ ID NO: 3713 - DNA, 361 bp, Artificial Sequence
  Description of Artificial Sequence: Synthetic polynucleotide
caggttcagctggtgcagtctggagctgaggtgaagaagcctggggcctcagtgaaggtctcctgcaagacttctggttacacctttagcaagtatggtatcagctgggtgcgacaggcccctggacaagggcttgagtggatgggatggatcagcggttacaatgataacacaaactatgcacagaagttccagggcagagtcagcatgaccacagacacatccacgaatacagcctacatggaactgaggagactgacatctgacgacacggccgtgtattactgtgcgagagtaacagtagaccgatactggtacttcgatctctggggccgtggcaccctggtcactgtctccccag

SEQ ID NO: 3714 - protein, 120 aa, Artificial Sequence
  Description of Artificial Sequence: Synthetic polypeptide
QVQLVQSGAEVKKPGASVKVSCKTSGYTFSKYGISWVRQAPGQGLEWMGWISGYNDNTNYAQKFQGRVSMTTDTSTNTAYMELRRLTSDDTAVYYCARVTVDRYWYFDLWGRGTLVTVSP

SEQ ID NO: 3715 - protein, 13 aa, Artificial Sequence
  Description of Artificial Sequence: Synthetic peptide
ARVTVDRYWYFDL

SEQ ID NO: 3716 - DNA, 337 bp, Artificial Sequence
  Description of Artificial Sequence: Synthetic polynucleotide
gatattgtgatgactcagtctccactctccctgcccgtcacccctggagagccggcctccatctcctgcaggtctagtcagagcctcttgcagagtaatggaaagaactatttggattggtacctgcagaagccagggcagtctccacagctcctgatctatttgggttctaatcgggcctccggggtccctgacaggttcagtgtcagtggatcaggcacagattttacactgaaaatcagcagagtggaggctgaggatgttggggtttattactgcatgcaaggtctacaaaccccgatcaccttcggccaagggacacgactggagattaaac

SEQ ID NO: 3717 - protein, 112 aa, Artificial Sequence
  Description of Artificial Sequence: Synthetic polypeptide
DIVMTQSPLSLPVTPGEPASISCRSSQSLLQSNGKNYLDWYLQKPGQSPQLLIYLGSNRASGVPDRFSVSGSGTDFTLKISRVEAEDVGVYYCMQGLQTPITFGQGTRLEIK

SEQ ID NO: 3718 - protein, 9 aa, Artificial Sequence
  Description of Artificial Sequence: Synthetic peptide
MQGLQTPIT

SEQ ID NO: 3719 - DNA, 361 bp, Artificial Sequence
  Description of Artificial Sequence: Synthetic polynucleotide
caggtgcagctggtggagtctgggggaggcgtggtccagcctgggaggtccctgagactctcctgtacagcctctggattcaccttcaataaccatggcatgcactgggtccgccaggctccaggcaaggggctggagtgggtggcaactatatcatatgatggaactgatgaggtctatgcagactccgtgaggggccgattcgacatctccagagacaattccgacaacgcgctgtatctgcaaatgaacagcctgagagctgaggacacggctgtatatttctgtgcgaaaggggaaacagttatagaccccctctttgactactggggccagggaaccctggtcaccgtctcctcag

SEQ ID NO: 3720 - protein, 120 aa, Artificial Sequence
  Description of Artificial Sequence: Synthetic polypeptide
QVQLVESGGGVVQPGRSLRLSCTASGFTFNNHGMHWVRQAPGKGLEWVATISYDGTDEVYADSVRGRFDISRDNSDNALYLQMNSLRAEDTAVYFCAKGETVIDPLFDYWGQGTLVTVSS

SEQ ID NO: 3721 - protein, 13 aa, Artificial Sequence
  Description of Artificial Sequence: Synthetic peptide
AKGETVIDPLFDY

SEQ ID NO: 3722 - DNA, 322 bp, Artificial Sequence
  Description of Artificial Sequence: Synthetic polynucleotide
gaaatagtgatgacgcagtctccagccaccctgtctgtgtctccaggggaaaaagccaccctctcctgtagggccagtcagagtgttggcagcaacttagcctggtatcagcagaaacctggccaggctcccaggctcctcatctatggtgcatccaccagggccactggtatcccagccaggttcagtggcagtgggtctgggacagagttcactctcaccatcatcagcctgcagtctgaagattttgcactttattactgtcagcagtatgattactggcctcccaccttcggccaagggacacgactggagattaaac

SEQ ID NO: 3723 - protein, 107 aa, Artificial Sequence
  Description of Artificial Sequence: Synthetic polypeptide
EIVMTQSPATLSVSPGEKATLSCRASQSVGSNLAWYQQKPGQAPRLLIYGASTRATGIPARFSGSGSGTEFTLTIISLQSEDFALYYCQQYDYWPPTFGQGTRLEIK

SEQ ID NO: 3724 - protein, 9 aa, Artificial Sequence
  Description of Artificial Sequence: Synthetic peptide
QQYDYWPPT

SEQ ID NO: 3725 - DNA, 352 bp, Artificial Sequence
  Description of Artificial Sequence: Synthetic polynucleotide
caggtgcagctggtgcagtctgggtctgaggtgaagaagcctgggtcctcggtgaaggtctcctgcaaggcttctggaggcaccttcagcacctatgctttcacctggttccgacaggcccctggaaaagggcttgagtggatgggaggagtaatccctgtatttggtacaccaaagtacgcacagaagttccagggcagagtcacgattaccgcgcatgaatccacgagaacagcctacatggagatgagcagcctgagatctgaggacacggccgtttattactgtgcgcgggggtatggtggcagctactatgactggggccagggaaccctggtcaccgtctcctcag

SEQ ID NO: 3726 - protein, 117 aa, Artificial Sequence
  Description of Artificial Sequence: Synthetic polypeptide
QVQLVQSGSEVKKPGSSVKVSCKASGGTFSTYAFTWFRQAPGKGLEWMGGVIPVFGTPKYAQKFQGRVTITAHESTRTAYMEMSSLRSEDTAVYYCARGYGGSYYDWGQGTLVTVSS

SEQ ID NO: 3727 - protein, 10 aa, Artificial Sequence
  Description of Artificial Sequence: Synthetic peptide
ARGYGGSYYD

SEQ ID NO: 3728 - DNA, 322 bp, Artificial Sequence
  Description of Artificial Sequence: Synthetic polynucleotide
gacatccagatgacccagtctccatcctccctgtctgcatctataggagacagagtcaccatcacttgccaggcgagtcaggacattagcaactatttaaattggtatcagcagaaaccaggtaaagcccctaagctcctgatctacgatgcttccaatttggaaacaggggtcccatccaggttcagtggaagtggatctgggacagattttactttcagcatcaccaacctgcagcctgaagatattgcaacttattactgtcaacagtatagtgatcccgcgctcactttcggcggggggaccaaggtggagatcaaac

SEQ ID NO: 3729 - protein, 107 aa, Artificial Sequence
  Description of Artificial Sequence: Synthetic polypeptide
DIQMTQSPSSLSASIGDRVTITCQASQDISNYLNWYQQKPGKAPKLLIYDASNLETGVPSRFSGSGSGTDFTFSITNLQPEDIATYYCQQYSDPALTFGGGTKVEIK

SEQ ID NO: 3730 - protein, 9 aa, Artificial Sequence
  Description of Artificial Sequence: Synthetic peptide
QQYSDPALT

SEQ ID NO: 3731 - DNA, 384 bp, Artificial Sequence
  Description of Artificial Sequence: Synthetic polynucleotide
gaggtgcagctggtggagtctgggggaggcctggtcaagcctggggggtccctgagactctcctgtgcagtctctggattcagcttcagtacctatagcatgaactgggtccgccaggctccagggaaggggctagagtgggtctcatccattagtagtagtagtagttacatatactacgcagactcagtgaagggccgattcaccatctccagagacaacgccaagaactcactgtatctgcaaatgaacagcctgagagccgaggacacggctgtgtattactgtgcgagagatggccccatctcaagtgtctacgacaatcactactactactacggaatggacgtctggggccaagggaccacggtcaccgtctcctca

SEQ ID NO: 3732 - protein, 128 aa, Artificial Sequence
  Description of Artificial Sequence: Synthetic polypeptide
EVQLVESGGGLVKPGGSLRLSCAVSGFSFSTYSMNWVRQAPGKGLEWVSSISSSSSYIYYADSVKGRFTISRDNAKNSLYLQMNSLRAEDTAVYYCARDGPISSVYDNHYYYYGMDVWGQGTTVTVSS

SEQ ID NO: 3733 - protein, 21 aa, Artificial Sequence
  Description of Artificial Sequence: Synthetic peptide
ARDGPISSVYDNHYYYYGMDV

SEQ ID NO: 3734 - DNA, 322 bp, Artificial Sequence
  Description of Artificial Sequence: Synthetic polynucleotide
gaaattgtgttgacacagtctccagccaccctgtctttgtctccaggggaaagagccaccctctcctgcagggccagtcagagtgtcagcagctacttagcctggtaccaacagaaacctggccaggctcccaggctcctcatctatgatgcatccaacagggccactggcatcccagccaggttcagtggcagtgggtctgggacagacttcactctcaccatcagcagcctagagcctgaagattttgcagtttattactgtcagcagcgtagcaactggcctcaaacgttcggccaagggaccaaggtggaaatcaaac

SEQ ID NO: 3735 - protein, 107 aa, Artificial Sequence
  Description of Artificial Sequence: Synthetic polypeptide
EIVLTQSPATLSLSPGERATLSCRASQSVSSYLAWYQQKPGQAPRLLIYDASNRATGIPARFSGSGSGTDFTLTISSLEPEDFAVYYCQQRSNWPQTFGQGTKVEIK

SEQ ID NO: 3736 - protein, 9 aa, Artificial Sequence
  Description of Artificial Sequence: Synthetic peptide
QQRSNWPQT

SEQ ID NO: 3737 - DNA, 358 bp, Artificial Sequence; identical to SEQ ID NO: 3215
  Description of Artificial Sequence: Synthetic polynucleotide

SEQ ID NO: 3738 - protein, 119 aa, Artificial Sequence; identical to SEQ ID NO: 3216
  Description of Artificial Sequence: Synthetic polypeptide

SEQ ID NO: 3739 - protein, 12 aa, Artificial Sequence
  Description of Artificial Sequence: Synthetic peptide
AREGGAAAEFDY

SEQ ID NO: 3740 - DNA, 335 bp, Artificial Sequence
  Description of Artificial Sequence: Synthetic polynucleotide
gatattgtgatgactcagtctccactctccctgcccgtcacccctggagagccggcctccatctcctgcaggtctagtcagagcctcctgcatagagatggatactactatttggattggtacctgcagaagccagggcagtctccacagctcctgatctatttgggttctaatcgggcctccggggtccctgacaggttcagtggcagtggatcaggcacagattttacactgaaaatcagcagagtggaggctgaagatgttggggtttattactgcatgcaagctctacaaactctccggacgttcggccaagggaccaaggtggaaatcaa

SEQ ID NO: 3741 - protein, 111 aa, Artificial Sequence
  Description of Artificial Sequence: Synthetic polypeptide
DIVMTQSPLSLPVTPGEPASISCRSSQSLLHRDGYYYLDWYLQKPGQSPQLLIYLGSNRASGVPDRFSGSGSGTDFTLKISRVEAEDVGVYYCMQALQTLRTFGQGTKVEI

SEQ ID NO: 3742 - protein, 9 aa, Artificial Sequence
  Description of Artificial Sequence: Synthetic peptide
MQALQTLRT

SEQ ID NO: 3743 - DNA, 370 bp, Artificial Sequence
  Description of Artificial Sequence: Synthetic polynucleotide
gaggtgcagctgttggagtctgggggaggcttggtacagcctggggggtccctgagactctcctgtgcagcctctggattcacttttaaagattatggcatgatctgggtccgccaggctccggggaaggggctggagtgggtctcagctatcactggcagtggttctaccacatactacgcagactccgtgaagggccgcttcaccatctccagagacaattccaagaacacactgtatctgcaaatgaactacctgagagccgaggacacggccgtgtattactgtgcgaaagattttatagtgggggctagtggagtctactactttgactactggggccagggaaccctggtcttcgtctcctcag

SEQ ID NO: 3744 - protein, 123 aa, Artificial Sequence
  Description of Artificial Sequence: Synthetic polypeptide
EVQLLESGGGLVQPGGSLRLSCAASGFTFKDYGMIWVRQAPGKGLEWVSAITGSGSTTYYADSVKGRFTISRDNSKNTLYLQMNYLRAEDTAVYYCAKDFIVGASGVYYFDYWGQGTLVFVSS

SEQ ID NO: 3745 - protein, 16 aa, Artificial Sequence
  Description of Artificial Sequence: Synthetic peptide
AKDFIVGASGVYYFDY

SEQ ID NO: 3746 - DNA, 325 bp, Artificial Sequence
  Description of Artificial Sequence: Synthetic polynucleotide
gaaatagtgatgacgcagtctccagccaccctgtctgtgtctccaggggaaagagccaccctctcctgcagggccagtcagagtgtgaatagcaacttagcctggtaccagcaaaaacctggccaggctcccaggctcctcatctatgatacatccaccagggccactggtgtcccagccaggttcagtggcagtgggtctgggacagagttcactctcaccatcagcagcctgcagtctgacgatcttgcagtttattactgtcagcaatacgatatctggcctcgtcggactttcggccctgggaccaaagtggctatcaaac

SEQ ID NO: 3747 - protein, 108 aa, Artificial Sequence
  Description of Artificial Sequence: Synthetic polypeptide
EIVMTQSPATLSVSPGERATLSCRASQSVNSNLAWYQQKPGQAPRLLIYDTSTRATGVPARFSGSGSGTEFTLTISSLQSDDLAVYYCQQYDIWPRRTFGPGTKVAIK

SEQ ID NO: 3748 - protein, 10 aa, Artificial Sequence
  Description of Artificial Sequence: Synthetic peptide
QQYDIWPRRT

SEQ ID NO: 3749 - DNA, 358 bp, Artificial Sequence
  Description of Artificial Sequence: Synthetic polynucleotide
caggtgcagctggtgcagtctggggctgaggtgaagagtcctgggtcctcggtgagggtctcctgcaaggcttctggaggcaccttcagcacctttgctaccagctgggtgcgacaggcccctggacaagggcttgagtggatgggagagatcatccctgtctttggaacaccaacctacgcacagaaattccagggcagagtcacaattaccgcggacgaatccacgagtacctcatacatggagctgagcagcctgacatcagacgacacggccgtgtattactgtgcgagagatgggggtggttcggcgagtttcgactactggggccagggaaccctggtcaccgtctcctcag

SEQ ID NO: 3750 - protein, 119 aa, Artificial Sequence
  Description of Artificial Sequence: Synthetic polypeptide
QVQLVQSGAEVKSPGSSVRVSCKASGGTFSTFATSWVRQAPGQGLEWMGEIIPVFGTPTYAQKFQGRVTITADESTSTSYMELSSLTSDDTAVYYCARDGGGSASFDYWGQGTLVTVSS

SEQ ID NO: 3751 - protein, 12 aa, Artificial Sequence
  Description of Artificial Sequence: Synthetic peptide
ARDGGGSASFDY

SEQ ID NO: 3752 - DNA, 337 bp, Artificial Sequence
  Description of Artificial Sequence: Synthetic polynucleotide
gatattgtgatgactcagtctccactctccctgcccgtcacccctggagagccggcctccatctcctgcaggtctagtcagagcctcctacatagtaatggatacaactatttggattggtacctgcagaagccagggcagtctccacaggtcctgatctttttgggttctaatcgggcctccggggtccctgacaggttcagtggcagtggatcaggcacacattttacactgaaaatcagcagagtggaggctgaggatgttggggtttattactgcatgcaaagtctacgaactcctcggacctttggccaggggaccaagctggagatcaaac

SEQ ID NO: 3753 - protein, 112 aa, Artificial Sequence
  Description of Artificial Sequence: Synthetic polypeptide
DIVMTQSPLSLPVTPGEPASISCRSSQSLLHSNGYNYLDWYLQKPGQSPQVLIFLGSNRASGVPDRFSGSGSGTHFTLKISRVEAEDVGVYYCMQSLRTPRTFGQGTKLEIK

SEQ ID NO: 3754 - protein, 9 aa, Artificial Sequence
  Description of Artificial Sequence: Synthetic peptide
MQSLRTPRT

SEQ ID NO: 3755 - DNA, 356 bp, Artificial Sequence
  Description of Artificial Sequence: Synthetic polynucleotide
gaagtgcagctggtgcagtctggagcagaggtgaaaaagcccggggagtctctgaggatctcctgtcaggcttctggatacacctttacccactactggatcacctgggtgcgccaaatgcccgggaaaggcctggagtggctggggaggattggtcctggtgacacttataccaactacagcccgtccttccaaggccacgtcaccatctcagctgacaggtccatccgcactgcctacctgcagtggagcagcctgaagccctcggacaccgccatctattactgtgcgagacacggcggagcagtgtctggttttgactactggggccagggaaccctggtcaccgtctcctc

SEQ ID NO: 3756 - protein, 118 aa, Artificial Sequence
  Description of Artificial Sequence: Synthetic polypeptide
EVQLVQSGAEVKKPGESLRISCQASGYTFTHYWITWVRQMPGKGLEWLGRIGPGDTYTNYSPSFQGHVTISADRSIRTAYLQWSSLKPSDTAIYYCARHGGAVSGFDYWGQGTLVTVS

SEQ ID NO: 3757 - protein, 12 aa, Artificial Sequence
  Description of Artificial Sequence: Synthetic peptide
ARHGGAVSGFDY

SEQ ID NO: 3758 - DNA, 325 bp, Artificial Sequence
  Description of Artificial Sequence: Synthetic polynucleotide
gacatccagatgacccagtctccatcctccctgtctgcatctgtaggagacagagtcaccatcacttgtcaggcgagtcgggacattagcaactttttaaattggtatcagcagaaaccagggcaggcccctaaactcctgatctacgatgcatccaatttggatgcaggggtcccatcaaggttcagtggaagtggatctgggacagattttactttcaccatcagcagcctgcagcctgaagatgttgcaacatattactgtcaacagtatgataatctccctacatacacttttggccaggggtccaagctggagctcaaac

SEQ ID NO: 3759 - protein, 108 aa, Artificial Sequence
  Description of Artificial Sequence: Synthetic polypeptide
DIQMTQSPSSLSASVGDRVTITCQASRDISNFLNWYQQKPGQAPKLLIYDASNLDAGVPSRFSGSGSGTDFTFTISSLQPEDVATYYCQQYDNLPTYTFGQGSKLELK

SEQ ID NO: 3760 - protein, 10 aa, Artificial Sequence
  Description of Artificial Sequence: Synthetic peptide
QQYDNLPTYT

SEQ ID NO: 3761 - DNA, 355 bp, Artificial Sequence
  Description of Artificial Sequence: Synthetic polynucleotide
caggtgcagctggtgcagtctggggctgaggtgaagaagcctgggtcctcggtgagggtctcctgcacggtttctggaggcaacttcaacaactatgctattacctgggtgcgtcaggcccctggacaagggcttgagtggatggcagagatcatccctatctttggtacaccaaaatacgcacagaagttccaggacagagtcacgattaccacggacacatccacgactacagcgtacatggacctgagcagcctgagatcggaggacacggccgtatattactgtgcgcgagatggaggtttggggagtcttcactactggggccagggaaccctggtctccgtctcctcag

SEQ ID NO: 3762 - protein, 118 aa, Artificial Sequence
  Description of Artificial Sequence: Synthetic polypeptide
QVQLVQSGAEVKKPGSSVRVSCTVSGGNFNNYAITWVRQAPGQGLEWMAEIIPIFGTPKYAQKFQDRVTITTDTSTTTAYMDLSSLRSEDTAVYYCARDGGLGSLHYWGQGTLVSVSS

SEQ ID NO: 3763 - protein, 11 aa, Artificial Sequence
  Description of Artificial Sequence: Synthetic peptide
ARDGGLGSLHY

SEQ ID NO: 3764 - DNA, 337 bp, Artificial Sequence
  Description of Artificial Sequence: Synthetic polynucleotide
gatattgtgatgactcagtctccactctccctgcccgtcacccctggagagccggcctccatctcctgcaggtctagtcagagcctcctgcatagagatggaaacacctacttggattggtacgtgcagaagccagggcgatctccacaactcctgatctatttggcttctaatcgggcctccggggtccctgacaggttcagtggcagtggatcaggcacagattttacactgaaaatcagccgagtggaggctgaggatgttggggtttattactgcatggaagctctacaaactcctcgggctttcggcggagggaccagggtggagatcaaac

SEQ ID NO: 3765 - protein, 112 aa, Artificial Sequence
  Description of Artificial Sequence: Synthetic polypeptide
DIVMTQSPLSLPVTPGEPASISCRSSQSLLHRDGNTYLDWYVQKPGRSPQLLIYLASNRASGVPDRFSGSGSGTDFTLKISRVEAEDVGVYYCMEALQTPRAFGGGTRVEIK

SEQ ID NO: 3766 - protein, 9 aa, Artificial Sequence
  Description of Artificial Sequence: Synthetic peptide
MEALQTPRA

SEQ ID NO: 3767 - DNA, 364 bp, Artificial Sequence
  Description of Artificial Sequence: Synthetic polynucleotide
caggtgcagctggtggagtctgggggaggcgtggtccagcctgggaggtccctgagactctcctgtgcagcctctggattcacgttcaggagccatggcatgcactgggtccgccaggctccaggcaaggggctggagtgggtggcagttatatcagatgatggaagtcagatagaatatggaggctccgtgaagggccgattcaccatctccagagacaattccaagaacacgctgtatctgcatatcaacagcctgagacctgaagacacggctgtgtattactgtgcgacagatccgcgggactggatcgacaactactttgactactggggtcagggaaccctggtcaccgtctcctcag

SEQ ID NO: 3768 - protein, 121 aa, Artificial Sequence
  Description of Artificial Sequence: Synthetic polypeptide
QVQLVESGGGVVQPGRSLRLSCAASGFTFRSHGMHWVRQAPGKGLEWVAVISDDGSQIEYGGSVKGRFTISRDNSKNTLYLHINSLRPEDTAVYYCATDPRDWIDNYFDYWGQGTLVTVSS

SEQ ID NO: 3769 - protein, 14 aa, Artificial Sequence
  Description of Artificial Sequence: Synthetic peptide
ATDPRDWIDNYFDY

SEQ ID NO: 3770 - DNA, 322 bp, Artificial Sequence
  Description of Artificial Sequence: Synthetic polynucleotide
gaaatagtgatgacgcagtctccagccaccctgtctgtgtctccaggggaaagagccaccctctcctgtagggccagtcagagtgtaaccagcaactttgcctggtaccagcagaaacctggccaggctcccaggctcctcatctatggtgcatcgaccagggccactggtatcccagccaggttcagtggcagtgggtctgggacagagttcactctcaccatcagcagcctgcagtctgaagatgctgcagtctattactgtcagcagtatgattactggccgctcactttcggcggagggaccaagctggagatcaaac

SEQ ID NO: 3771 - protein, 107 aa, Artificial Sequence
  Description of Artificial Sequence: Synthetic polypeptide
EIVMTQSPATLSVSPGERATLSCRASQSVTSNFAWYQQKPGQAPRLLIYGASTRATGIPARFSGSGSGTEFTLTISSLQSEDAAVYYCQQYDYWPLTFGGGTKLEIK

SEQ ID NO: 3772 - protein, 9 aa, Artificial Sequence
  Description of Artificial Sequence: Synthetic peptide
QQYDYWPLT

SEQ ID NO: 3773 - DNA, 352 bp, Artificial Sequence
  Description of Artificial Sequence: Synthetic polynucleotide
caggtgcagctggtgcagtctggggctgaggtgaagaagcctgggtcctcggtgaaggtctcctgcaaggcttctggaggcaccttcagcaattatggtatcaattgggtgcgacaggcccctggacaagggcttgagtggatgggaaagatcatccctatctttgggacagcaaactatgcacagaagttccagggcagagtcacgattaccgcggacgaatccacgagcacagcctacatggagctgcgcagcctgagatctgaggacacggccgtgtattactgtgcgagagatgacgcagtggttcttgactactggggccagggaaccctggtcaccgtctcctcag

SEQ ID NO: 3774 - protein, 117 aa, Artificial Sequence
  Description of Artificial Sequence: Synthetic polypeptide
QVQLVQSGAEVKKPGSSVKVSCKASGGTFSNYGINWVRQAPGQGLEWMGKIIPIFGTANYAQKFQGRVTITADESTSTAYMELRSLRSEDTAVYYCARDDAVVLDYWGQGTLVTVSS

SEQ ID NO: 3775 - protein, 10 aa, Artificial Sequence
  Description of Artificial Sequence: Synthetic peptide
ARDDAVVLDY

SEQ ID NO: 3776 - DNA, 322 bp, Artificial Sequence
  Description of Artificial Sequence: Synthetic polynucleotide
gacatccagatgacccagtctccatcctccctgtctgcatctgtaggagacagagtcaccatcacttgccgggcaagtcagggcattagaaatgatttaggctggtatcagcagaaaccagggaaagcccctaagcgcctgatctatgctgcatccagtttgctaagtggggtcccatcacggttcagcggcagtggatctgggacagaattcactctcacaatcagcagcctgcagcctgaagattttgcaacttattactgtctacagcataagacttacccgatcaccttcggccaagggacacgactggagattaaac

SEQ ID NO: 3777 - protein, 107 aa, Artificial Sequence
  Description of Artificial Sequence: Synthetic polypeptide
DIQMTQSPSSLSASVGDRVTITCRASQGIRNDLGWYQQKPGKAPKRLIYAASSLLSGVPSRFSGSGSGTEFTLTISSLQPEDFATYYCLQHKTYPITFGQGTRLEIK

SEQ ID NO: 3778 - protein, 9 aa, Artificial Sequence
  Description of Artificial Sequence: Synthetic peptide
LQHKTYPIT

SEQ ID NO: 3779 - DNA, 364 bp, Artificial Sequence; identical to SEQ ID NO: 185
  Description of Artificial Sequence: Synthetic polynucleotide

SEQ ID NO: 3780 - protein, 121 aa, Artificial Sequence; identical to SEQ ID NO: 67
  Description of Artificial Sequence: Synthetic polypeptide

SEQ ID NO: 3781 - protein, 14 aa, Artificial Sequence
  Description of Artificial Sequence: Synthetic peptide
AKDPASWVDNWFDS

SEQ ID NO: 3782 - DNA, 322 bp, Artificial Sequence
  Description of Artificial Sequence: Synthetic polynucleotide
gaaatagtgatgacgcagtctccagccaccctgtctctgtctccaggggaaagagccaccctctcctgcagggccagtcggagtgttggcaccaacttagcctggtaccagcagaaacctggccaggctcccaggctcctcatgtctggtgcatccaccagggccactggcatcccagacaggttcagtgccagtgggtctgggacagagttcactctcaccatcagcagcctgcagtctgaagattttgcagtttattactgtcagcagtatgactactggccgctcactttcggcggaggggccaaggtggagatcaaac

SEQ ID NO: 3783 - protein, 107 aa, Artificial Sequence
  Description of Artificial Sequence: Synthetic polypeptide
EIVMTQSPATLSLSPGERATLSCRASRSVGTNLAWYQQKPGQAPRLLMSGASTRATGIPDRFSASGSGTEFTLTISSLQSEDFAVYYCQQYDYWPLTFGGGAKVEIK

SEQ ID NO: 3784 - protein, 9 aa, Artificial Sequence
  Description of Artificial Sequence: Synthetic peptide
QQYDYWPLT

SEQ ID NO: 3785 - DNA, 355 bp, Artificial Sequence
  Description of Artificial Sequence: Synthetic polynucleotide
caggtgcagctggtgcagtctggggctgaggtgaagaagcctgggtcctcggtgaaggtctcctgcaaggcttctggaggcatcttcagcaattatgctatcaactgggtgcgacaggcccctggacaagggcttgagtggatgggagggatcatccctttctttggttcaccaaattatgcacagaagtttcggggcagagtcacgattaccgcggacgcctcaatgagcacagcctacatggaactgagcagcctgaaatctgacgacacggccgtctattattgtgcgagagcatatggggtcaccgggggggactactggggccagggaaccctggtcaccgtctcctcag

SEQ ID NO: 3786 - protein, 118 aa, Artificial Sequence
  Description of Artificial Sequence: Synthetic polypeptide
QVQLVQSGAEVKKPGSSVKVSCKASGGIFSNYAINWVRQAPGQGLEWMGGIIPFFGSPNYAQKFRGRVTITADASMSTAYMELSSLKSDDTAVYYCARAYGVTGGDYWGQGTLVTVSS

SEQ ID NO: 3787 - protein, 11 aa, Artificial Sequence
  Description of Artificial Sequence: Synthetic peptide
ARAYGVTGGDY

SEQ ID NO: 3788 - DNA, 325 bp, Artificial Sequence
  Description of Artificial Sequence: Synthetic polynucleotide
gacatccagatgacccagtctccatcctccctgtctgcatctgtaggagacagagtcaccatcacttgccaggcgagtcaggacattaccaactatttaaattggtatcagcagaaaccagggaaagcccctaaggtcctgatctacgatgcatccaatttggaaacaggggtcccatcaagattcagtggaagtggatctgggacactttttactttcaccatcaatagcctgcagcctgaagatgctgcaacatattactgtcaacagtacaatagtctcccttcgctcactttcggcggagggaccaaggtggagatcaaac

SEQ ID NO: 3789 - protein, 108 aa, Artificial Sequence
  Description of Artificial Sequence: Synthetic polypeptide
DIQMTQSPSSLSASVGDRVTITCQASQDITNYLNWYQQKPGKAPKVLIYDASNLETGVPSRFSGSGSGTLFTFTINSLQPEDAATYYCQQYNSLPSLTFGGGTKVEIK

SEQ ID NO: 3790 - protein, 10 aa, Artificial Sequence
  Description of Artificial Sequence: Synthetic peptide
QQYNSLPSLT

SEQ ID NO: 3791 - DNA, 355 bp, Artificial Sequence
  Description of Artificial Sequence: Synthetic polynucleotide
caaatgcagctggtgcagtctgggcctgacgtgaagaagcctgggacctcagtgaaggtctcctgcaaggcttctggattcatctctagtatctctgctgtgcactgggtgcgacaggctcgtggacaacgccttgagtggatgggatgggtcgtcgttgcgagtggtaacacaaactacgctcagaagttccatgaaagagtcaccattaccagggacatgtccacaagtacagtttacatggagctgagcagcctgagatccgaagacacggccgtttattactgtgcggcagggcctcgattgcggtggttcgacccctggggccaggggaccctggtcaccgtctcctcag

SEQ ID NO: 3792 - protein, 118 aa, Artificial Sequence
  Description of Artificial Sequence: Synthetic polypeptide
QMQLVQSGPDVKKPGTSVKVSCKASGFISSISAVHWVRQARGQRLEWMGWVVVASGNTNYAQKFHERVTITRDMSTSTVYMELSSLRSEDTAVYYCAAGPRLRWFDPWGQGTLVTVSS

SEQ ID NO: 3793 - protein, 11 aa, Artificial Sequence
  Description of Artificial Sequence: Synthetic peptide
AAGPRLRWFDP

SEQ ID NO: 3794 - DNA, 340 bp, Artificial Sequence
  Description of Artificial Sequence: Synthetic polynucleotide
gacatcgtgatgacccagtctccagactccctggctgtgtctctgggcgagagggccaccatcaactgcaagtccagccagagtgttttatacagctccagcaatatgaactacttagcttggtaccagcagaaaccaggacaccctcctaagctgctcatttactgggcatctacccgggaatccggggtccctgaccgattcagtggcggcgggtctgggacagacttcactctcaccatcagcagcctgcaggctgaagatgtggcagtttatttctgtcagcaatattatactactcctctcactttcggcggagggaccaaggtggagatcaaac

SEQ ID NO: 3795 - protein, 113 aa, Artificial Sequence; identical to SEQ ID NO: 92
  Description of Artificial Sequence: Synthetic polypeptide

SEQ ID NO: 3796 - protein, 9 aa, Artificial Sequence
  Description of Artificial Sequence: Synthetic peptide
QQYYTTPLT

SEQ ID NO: 3797 - DNA, 352 bp, Artificial Sequence
  Description of Artificial Sequence: Synthetic polynucleotide
caggtgcagctgcaggagtcgggcccaggactggtgaagccttcggggaccctgtccctcacctgcgctatctctggtgactccatcgtcagtagtcactggtggagttgggtccgccagcccccagggaaggggctggagtggattggagagatctttcatagtgggagcaccaactacaattcgtccctcaagagtcgagtcaccatatcagtagacgagtccaagaaccagttctacctgaagctgaactctgtgacccccgcggacacggccgtatattactgtgcgagattgggatatgggagcacgggctactggggccagggaaccctggtcaccgtctcctcag

SEQ ID NO: 3798 - protein, 117 aa, Artificial Sequence
  Description of Artificial Sequence: Synthetic polypeptide
QVQLQESGPGLVKPSGTLSLTCAISGDSIVSSHWWSWVRQPPGKGLEWIGEIFHSGSTNYNSSLKSRVTISVDESKNQFYLKLNSVTPADTAVYYCARLGYGSTGYWGQGTLVTVSS

SEQ ID NO: 3799 - protein, 10 aa, Artificial Sequence
  Description of Artificial Sequence: Synthetic peptide
ARLGYGSTGY

SEQ ID NO: 3800 - DNA, 332 bp, Artificial Sequence
  Description of Artificial Sequence: Synthetic polynucleotide
gatattgtgatgactcagtctccactctccctgcccgtcacccctggagagccggcctccatctcctgcaggtctagtcagagcctcctgcatagtaacggatacaactatttggattggtacctgcagaagccagggcagtctccacagctcctgatctatttgggttctaatcgggcctccggggtccctgacaggttcaggggcagtggatcaggcacagattttacactgacaatcagcagactggaggctggggatgttggggtttattactgcatgcaagctctagaaagtcccactttcggcggagggaccaaggtggagctcaa

SEQ ID NO: 3801 - protein, 110 aa, Artificial Sequence
  Description of Artificial Sequence: Synthetic polypeptide
DIVMTQSPLSLPVTPGEPASISCRSSQSLLHSNGYNYLDWYLQKPGQSPQLLIYLGSNRASGVPDRFRGSGSGTDFTLTISRLEAGDVGVYYCMQALESPTFGGGTKVEL

SEQ ID NO: 3802 - protein, 8 aa, Artificial Sequence
  Description of Artificial Sequence: Synthetic peptide
MQALESPT

SEQ ID NO: 3803 - DNA, 349 bp, Artificial Sequence
  Description of Artificial Sequence: Synthetic polynucleotide
caggtgcagctggtgcagtctggggctgaggtgaagaagcctgggtcctcggtgaaggtctcctgcaagacttctggaggcaccttcagcaactatgctatcagctgggtgcgacaggcccctggacaagggcttgagtggatgggagggatcatccctatctttggtacaccaaactacgcacagaagttccagggcagagtcaccattaccgcggacaaatccacgagcacagcctacttggagctgagcggcctgagatctgaggacacggccgtttatttctgtgcgagagatcccgatatgtcagggcgttggggccagggaaccctggtcaccgtctcctcag

SEQ ID NO: 3804 - protein, 116 aa, Artificial Sequence
  Description of Artificial Sequence: Synthetic polypeptide
QVQLVQSGAEVKKPGSSVKVSCKTSGGTFSNYAISWVRQAPGQGLEWMGGIIPIFGTPNYAQKFQGRVTITADKSTSTAYLELSGLRSEDTAVYFCARDPDMSGRWGQGTLVTVSS

SEQ ID NO: 3805 - protein, 9 aa, Artificial Sequence
  Description of Artificial Sequence: Synthetic peptide
ARDPDMSGR

SEQ ID NO: 3806 - DNA, 322 bp, Artificial Sequence
  Description of Artificial Sequence: Synthetic polynucleotide
gacatccagatgacccagtctccttccaccctgtctgcatatgtaggagacagagtcaccatcacttgccgggccagtcagagtattagtagctggttggcctggtttcagcagaaaccagggaaagcccctaagctcctgatctataaggcgtctagtttagaaagtggggtcccatcaaggttcagcggcagtggatctgggacagaattcactctcaccatcagcagcctgcagcctgatgattttgcaacttattactgccaacagtataatagttatttgtgggcgttcggccaagggaccaaggtggaaatcaaac

SEQ ID NO: 3807 - protein, 107 aa, Artificial Sequence
  Description of Artificial Sequence: Synthetic polypeptide
DIQMTQSPSTLSAYVGDRVTITCRASQSISSWLAWFQQKPGKAPKLLIYKASSLESGVPSRFSGSGSGTEFTLTISSLQPDDFATYYCQQYNSYLWAFGQGTKVEIK

SEQ ID NO: 3808 - protein, 9 aa, Artificial Sequence
  Description of Artificial Sequence: Synthetic peptide
QQYNSYLWA

SEQ ID NO: 3809 - DNA, 361 bp, Artificial Sequence
  Description of Artificial Sequence: Synthetic polynucleotide
caggtgcagctggtgcagtctgggactgaggtgaagaagcctgggtcctcggtgaaggtctcctgcaaggcttctggaggcaccttcagcaactatggtatcaactgggtgcgacaggcccctggacaagggcttgagtggatgggagcgatcatccctctgtttgggacagcaaactacgcacaggagttccagggcagagtcactatcaccgcggacaagtccacgagcacagcctacatggagttgagtagcctgagatctgacgacacggccatctattactgtgcgagatgtggtggtgcctgctcttggggaattgactactggggccagggaaccctggtcaccgtctcctcag

SEQ ID NO: 3810 - protein, 120 aa, Artificial Sequence
  Description of Artificial Sequence: Synthetic polypeptide
QVQLVQSGTEVKKPGSSVKVSCKASGGTFSNYGINWVRQAPGQGLEWMGAIIPLFGTANYAQEFQGRVTITADKSTSTAYMELSSLRSDDTAIYYCARCGGACSWGIDYWGQGTLVTVSS

SEQ ID NO: 3811 - protein, 13 aa, Artificial Sequence
  Description of Artificial Sequence: Synthetic peptide
ARCGGACSWGIDY

SEQ ID NO: 3812 - DNA, 322 bp, Artificial Sequence
  Description of Artificial Sequence: Synthetic polynucleotide
gacatccagttgacccagtctccatccttcctgtctgcatctgtaggagacagagtcaccatcacttgccgggccagtcagggcattagcagttatttagcctggtatcaacaagaaccagggaaagcccctaaactcctgatctatgctgcatccactttgcgaaatggggtcccatcaaggttcagcggcagtggatctgggacagaattcactctcacaatcagcagcctgcagcctgaagattttgcaacttattactgtcaacagcttaattcttacccgtacacttttggccaggggaccaagctggagatcaaac

SEQ ID NO: 3813 - protein, 107 aa, Artificial Sequence
  Description of Artificial Sequence: Synthetic polypeptide
DIQLTQSPSFLSASVGDRVTITCRASQGISSYLAWYQQEPGKAPKLLIYAASTLRNGVPSRFSGSGSGTEFTLTISSLQPEDFATYYCQQLNSYPYTFGQGTKLEIK

SEQ ID NO: 3814 - protein, 9 aa, Artificial Sequence
  Description of Artificial Sequence: Synthetic peptide
QQLNSYPYT

SEQ ID NO: 3815 - DNA, 370 bp, Artificial Sequence
  Description of Artificial Sequence: Synthetic polynucleotide
caggtgcagctggtggagtctgggggaggcgtggtccagcctgggaggtccctgagactctcctgtgcagcctctggcttcaacttcaataacttcgccatgcactgggtccgccaggctccaggcaaggggctggagtgggtggcagttatatcagatgatggaagtcagaaagagtatggaggctccgtgaagggccgatacaccatctccagagacaattccgagagcacactctatctgcagatgaacagcctgagagctgaggacacggctgtgtattactgtgcgaaagatagtagtagctgggttgacaactggttcgagttcgacccttggggccagggagccctggtcaccgtctcctcag

SEQ ID NO: 3816 - protein, 123 aa, Artificial Sequence
  Description of Artificial Sequence: Synthetic polypeptide
QVQLVESGGGVVQPGRSLRLSCAASGFNFNNFAMHWVRQAPGKGLEWVAVISDDGSQKEYGGSVKGRYTISRDNSESTLYLQMNSLRAEDTAVYYCAKDSSSWVDNWFEFDPWGQGALVTVSS

SEQ ID NO: 3817 - protein, 16 aa, Artificial Sequence
  Description of Artificial Sequence: Synthetic peptide
AKDSSSWVDNWFEFDP

SEQ ID NO: 3818 - DNA, 322 bp, Artificial Sequence
  Description of Artificial Sequence: Synthetic polynucleotide
gaaatagtgatgacgcagtctccagccaccctgtctgtgtctccaggggaaagagccaccctctcctgcagggccagtcagagtgttggcagcaacttagcctggtaccagcagaaacctggccaggctcccagactcctcatctatggtgcatccaccagggccactggtatcccagccaggttcagtggcagtgggtctgggacagacttcactctctccatcagcagcctgcagtctgaagattttgcagttttttactgtcagcagtatgattactggccgctcaccttcggccaagggacacgactggagattaaac

SEQ ID NO: 3819 - protein, 107 aa, Artificial Sequence
  Description of Artificial Sequence: Synthetic polypeptide
EIVMTQSPATLSVSPGERATLSCRASQSVGSNLAWYQQKPGQAPRLLIYGASTRATGIPARFSGSGSGTDFTLSISSLQSEDFAVFYCQQYDYWPLTFGQGTRLEIK

SEQ ID NO: 3820 - protein, 9 aa, Artificial Sequence
  Description of Artificial Sequence: Synthetic peptide
QQYDYWPLT

SEQ ID NO: 3821 - DNA, 352 bp, Artificial Sequence
  Description of Artificial Sequence: Synthetic polynucleotide
caggttcagctggtgcagtctggaggtgaactgaagaagcctggggcctcagtgaaggtctcctgcaagacttctggttacacctttacgcactacggtatcaactgggtgcgacaggcccctggacaagggcttgagtggctgggatgggtcagcgcttacaacggtgacacaaactatgcacagaacctccagggcagagtcaccatgaccacagacacatccacgagcacagcctacatggagctgaggagcctgagatctggcgacacggccgtgtattactgtgcgagagccgggggattcagcgggggctactggggccagggaaccctggtcaccgtctcctcag

SEQ ID NO: 3822 - protein, 117 aa, Artificial Sequence
  Description of Artificial Sequence: Synthetic polypeptide
QVQLVQSGGELKKPGASVKVSCKTSGYTFTHYGINWVRQAPGQGLEWLGWVSAYNGDTNYAQNLQGRVTMTTDTSTSTAYMELRSLRSGDTAVYYCARAGGFSGGYWGQGTLVTVSS

SEQ ID NO: 3823 - protein, 10 aa, Artificial Sequence
  Description of Artificial Sequence: Synthetic peptide
ARAGGFSGGY

SEQ ID NO: 3824 - DNA, 322 bp, Artificial Sequence
  Description of Artificial Sequence: Synthetic polynucleotide
gacatccagatgacccagtctccatcctccctgtctgcatctgttggagacagagtcaccatcacttgccaggcgagtcaggacattagcaactatttacattggtatcagcacaaaccagggaaagcccctaagctcctgatctacgatgcatccaatttggaaacaggggtcccatcaaggttcagtggaagtggatctgggacagatttttctttcaccatcagcagcctgcagcctgaagatattgcaacatattactgtcaacagtatgataataaccttctcactttcggcggagggaccaaggtggagatcaaac

SEQ ID NO: 3825 - protein, 107 aa, Artificial Sequence
  Description of Artificial Sequence: Synthetic polypeptide
DIQMTQSPSSLSASVGDRVTITCQASQDISNYLHWYQHKPGKAPKLLIYDASNLETGVPSRFSGSGSGTDFSFTISSLQPEDIATYYCQQYDNNLLTFGGGTKVEIK

SEQ ID NO: 3826 - protein, 9 aa, Artificial Sequence
  Description of Artificial Sequence: Synthetic peptide
QQYDNNLLT

SEQ ID NO: 3827 - DNA, 361 bp, Artificial Sequence
  Description of Artificial Sequence: Synthetic polynucleotide
caggtgcagctggtggagtctgggggaggcgtggtccagcctgggaggtccctgagactctcctgtacagcgtctggattcaccttcagtagctatggcatgcactgggtccgccaggctccaggcaaggggctggagtgggtggcacttatttgggatgatggaagtgtcaaacactatccagactccctgaagggccgattcaccatctccagagacaattccaagaacatgctttttctgcaaatgaacagcctgagagtcgaggacacggctatctattactgtgcgagagatataggtggtagcagtagccccttcgatctctggggccgtggcaccctggtcactgtctcctcag

SEQ ID NO: 3828 - protein, 120 aa, Artificial Sequence
  Description of Artificial Sequence: Synthetic polypeptide
QVQLVESGGGVVQPGRSLRLSCTASGFTFSSYGMHWVRQAPGKGLEWVALIWDDGSVKHYPDSLKGRFTISRDNSKNMLFLQMNSLRVEDTAIYYCARDIGGSSSPFDLWGRGTLVTVSS

SEQ ID NO: 3829 - protein, 13 aa, Artificial Sequence
  Description of Artificial Sequence: Synthetic peptide
ARDIGGSSSPFDL

SEQ ID NO: 3830 - DNA, 322 bp, Artificial Sequence
  Description of Artificial Sequence: Synthetic polynucleotide
gaaattgtgttgacacagtctccagccaccctgtctttgtctccaggggaaagagccaccctctcctgcagggccagtcagagtgttagcacctacttagcctggtaccaacagaaacctggccaggctcccaggctcctcatctatgatgcatcgaacagggccactggcatcccagccaggttcagtggcagtgggtctgggacagacttcactctcaccatcagcagcctagagcctgaagattttgcagtttattactgtcagcagcgtaacacctggcccttcactttcggcggggggaccaaggtggagatcaaac

SEQ ID NO: 3831 - protein, 107 aa, Artificial Sequence
  Description of Artificial Sequence: Synthetic polypeptide
EIVLTQSPATLSLSPGERATLSCRASQSVSTYLAWYQQKPGQAPRLLIYDASNRATGIPARFSGSGSGTDFTLTISSLEPEDFAVYYCQQRNTWPFTFGGGTKVEIK

SEQ ID NO: 3832 - protein, 9 aa, Artificial Sequence
  Description of Artificial Sequence: Synthetic peptide
QQRNTWPFT

SEQ ID NO: 3833 - DNA, 358 bp, Artificial Sequence
  Description of Artificial Sequence: Synthetic polynucleotide
caggtgcagctggtgcagtctggggctgaggtgaagaagcctgggtcctcggtgagggtctcctgcaaggcttctggaggcaccttcaacaactttgctatccactgggtgcgacaggcccctggacaagggcttgagtccatgggaggcatcatccctgtttttgatactccacactacgcacagaagttccagggcagagtcacgattaccgcggacaaatccacgagcacagcctacatggagctgcgcagcctgacatctgaggacacggccgtgtattactgtgcgagaggcggggggggagctccctctctggactactggggccagggaaccctggtcaccgtctcctcag

SEQ ID NO: 3834 - protein, 119 aa, Artificial Sequence
  Description of Artificial Sequence: Synthetic polypeptide
QVQLVQSGAEVKKPGSSVRVSCKASGGTFNNFAIHWVRQAPGQGLESMGGIIPVFDTPHYAQKFQGRVTITADKSTSTAYMELRSLTSEDTAVYYCARGGGGAPSLDYWGQGTLVTVSS

SEQ ID NO: 3835 - protein, 12 aa, Artificial Sequence
  Description of Artificial Sequence: Synthetic peptide
ARGGGGAPSLDY

SEQ ID NO: 3836 - DNA, 337 bp, Artificial Sequence
  Description of Artificial Sequence: Synthetic polynucleotide
gatattgtgatgactcagtctccactctccctgcccgtcacccctggagagccggcctccatctcctgcaggtccagtcagagcctcctgcatagaagtggatacaactatttggattggtacctgcagaagccagggcagtctccacagctcctgatctatatgggttctaatcgggcctccggggtccctgacaggttcagtggcagtggatcaggcacagattttacactgaaaatcagcagagtggaggctgaggatgttggggtttattactgcatgcaagctctacaaactcctgtcaccttcggccaagggacacgactggagattaaac

SEQ ID NO: 3837 - protein, 112 aa, Artificial Sequence
  Description of Artificial Sequence: Synthetic polypeptide
DIVMTQSPLSLPVTPGEPASISCRSSQSLLHRSGYNYLDWYLQKPGQSPQLLIYMGSNRASGVPDRFSGSGSGTDFTLKISRVEAEDVGVYYCMQALQTPVTFGQGTRLEIK

SEQ ID NO: 3838 - protein, 9 aa, Artificial Sequence
  Description of Artificial Sequence: Synthetic peptide
MQALQTPVT

SEQ ID NO: 3839 - DNA, 369 bp, Artificial Sequence
  Description of Artificial Sequence: Synthetic polynucleotide
caggtgcagctggtgcagtctggggctgaggtgaagaagcctgggtcctcggtgaaggtctcctgtaaggtttctggaggcaccttcaacacctatgctatcaactgggtgcgacaggcccctggacaagggcttgagtggatgggagggatcatccctttttttggtacaccaaactatgcacagaaattccagggcagagtcacgattaccgcggacaaatccacgaccacagcctacatggagctgactagcctgagatctgaggacacggccgtctattattgtgcgagagataaggattactatggttcggggggctggggtatggacgtctggggccaagggaccacggtcaccgtctcgtca

SEQ ID NO: 3840 - protein, 123 aa, Artificial Sequence
  Description of Artificial Sequence: Synthetic polypeptide
QVQLVQSGAEVKKPGSSVKVSCKVSGGTFNTYAINWVRQAPGQGLEWMGGIIPFFGTPNYAQKFQGRVTITADKSTTTAYMELTSLRSEDTAVYYCARDKDYYGSGGWGMDVWGQGTTVTVSS

SEQ ID NO: 3841 - protein, 16 aa, Artificial Sequence
  Description of Artificial Sequence: Synthetic peptide
ARDKDYYGSGGWGMDV

SEQ ID NO: 3842 - DNA, 322 bp, Artificial Sequence
  Description of Artificial Sequence: Synthetic polynucleotide
gaaattgtgttgacacagtctccagccaccctgtcgttgtctccaggggaaagagccaccctctcctgcagggccagtcagagtgttaccagctacgtagcctggtaccaacataaacctggccaggctcccaggctcctcatctatgatgcatcccatagggccactggcatcccagccaggttcagtggcagtgggtctgggacagacttcactctcaccatcagcagcctacagcctgaagattttgcagtttattactgtcagcagcgtagcatctggcctctcaccttcggccaggggacacgactggagcttaaac

SEQ ID NO: 3843 - protein, 107 aa, Artificial Sequence
  Description of Artificial Sequence: Synthetic polypeptide
EIVLTQSPATLSLSPGERATLSCRASQSVTSYVAWYQHKPGQAPRLLIYDASHRATGIPARFSGSGSGTDFTLTISSLQPEDFAVYYCQQRSIWPLTFGQGTRLELK

SEQ ID NO: 3844 - protein, 9 aa, Artificial Sequence
  Description of Artificial Sequence: Synthetic peptide
QQRSIWPLT

SEQ ID NO: 3845 - DNA, 355 bp, Artificial Sequence
  Description of Artificial Sequence: Synthetic polynucleotide
caggtgcagctggtgcagtctggggctgaggtgaggaagcctgggtcctcggtgaaggtctcctgcaaggcttctggaggcaccttcagtcactatggtatcagctgggtgcgacaggcccctggacaagggcttgagtggatgggagggatcatccctatctttggtacaagaaactacgcacagaagttccagggcagagtcacgattaccgcggacgaatccacgagcacagcctacatggacctgaacagcctgagatctgaagacacggccgtgtattactgtgcgagagagtttgggagtactggtggtcagtactggggccagggaaccctggtcaccgtctcctcag

SEQ ID NO: 3846 - protein, 118 aa, Artificial Sequence
  Description of Artificial Sequence: Synthetic polypeptide
QVQLVQSGAEVRKPGSSVKVSCKASGGTFSHYGISWVRQAPGQGLEWMGGIIPIFGTRNYAQKFQGRVTITADESTSTAYMDLNSLRSEDTAVYYCAREFGSTGGQYWGQGTLVTVSS

SEQ ID NO: 3847 - protein, 11 aa, Artificial Sequence
  Description of Artificial Sequence: Synthetic peptide
AREFGSTGGQY

SEQ ID NO: 3848 - DNA, 325 bp, Artificial Sequence
  Description of Artificial Sequence: Synthetic polynucleotide
gacatccagatgacccagtctccatcctccctgtctgcatctgttggagacagagtcaccatcacttgccaggcgagtcaggacattagcaactatttaaattggtatcagcaaaaaccagggaaagcccctaagctcctgatctacgatgcatccaatttggaaacaggggtcccatcaagattcagtggaagtggatctgggacagatttttctttcaccatcagcagcctgcagcctgacgatattgcaacatattactgtcaacattataatagtctcccctcgctcactttcggcggagggaccaaggtggagatcaaac

SEQ ID NO: 3849 - protein, 108 aa, Artificial Sequence
  Description of Artificial Sequence: Synthetic polypeptide
DIQMTQSPSSLSASVGDRVTITCQASQDISNYLNWYQQKPGKAPKLLIYDASNLETGVPSRFSGSGSGTDFSFTISSLQPDDIATYYCQHYNSLPSLTFGGGTKVEIK

SEQ ID NO: 3850 - protein, 10 aa, Artificial Sequence
  Description of Artificial Sequence: Synthetic peptide
QHYNSLPSLT

SEQ ID NO: 3851 - DNA, 369 bp, Artificial Sequence
  Description of Artificial Sequence: Synthetic polynucleotide
caggtgcagctggtggagtctgggggaggcgtggtccagcctgggaggtccctgagactctcctgtgcagcctctgcattcgccttcagtcgttatgccatgtactgggtccgccaggctccaggcaaggggctggagtgggtggcagttatatcatttgacggaagtaacatacattatggagactccgtgaggggccgattcaccatttccagagacaattctaagaacacggtgcatctgcaaatgaacagcctgagagctgaggacacggctgtttattactgtgtgaaagatggggacaattatggttacgggttgtacggcatggacgcctggggccaagggaccgcggtcaccgtctcttca

SEQ ID NO: 3852 - protein, 123 aa, Artificial Sequence
  Description of Artificial Sequence: Synthetic polypeptide
QVQLVESGGGVVQPGRSLRLSCAASAFAFSRYAMYWVRQAPGKGLEWVAVISFDGSNIHYGDSVRGRFTISRDNSKNTVHLQMNSLRAEDTAVYYCVKDGDNYGYGLYGMDAWGQGTAVTVSS

SEQ ID NO: 3853 - protein, 16 aa, Artificial Sequence
  Description of Artificial Sequence: Synthetic peptide
VKDGDNYGYGLYGMDA

SEQ ID NO: 3854 - DNA, 322 bp, Artificial Sequence
  Description of Artificial Sequence: Synthetic polynucleotide
gaaattgtgttgacacagtctccagccaccctgtctgtgtctccaggggaaagagccaccctctcctgcagggccagtcagagtgttaacacctacgtagcctggtaccaacagatccctggccgggctcccaggctcctcatctatgatgcatccaatagggtcactggcatcccagccaggttcagtggcagtgggtctgggacagacttcactctcaccatcagcagccttgagcctgaagattttgcagtttattactgtcagcagcgtagcaactggccgatcaccttcggcccagggacacgactggagattaaac

SEQ ID NO: 3855 - protein, 107 aa, Artificial Sequence
  Description of Artificial Sequence: Synthetic polypeptide
EIVLTQSPATLSVSPGERATLSCRASQSVNTYVAWYQQIPGRAPRLLIYDASNRVTGIPARFSGSGSGTDFTLTISSLEPEDFAVYYCQQRSNWPITFGPGTRLEIK

SEQ ID NO: 3856 - protein, 9 aa, Artificial Sequence
  Description of Artificial Sequence: Synthetic peptide
QQRSNWPIT

SEQ ID NO: 3857 - DNA, 355 bp, Artificial Sequence
  Description of Artificial Sequence: Synthetic polynucleotide
caggtgcagctggtgcagtctggggctgaggtgaagaagcctgggtcctcggtgaaggtctcctgcaaggcttctggaggcaccttcagcaactatgctatcagctgggtgcgacaggcccctggacaagggcttgagtggattggagggatcatccctgcctttggaacaccaaagtacgcacataagttccagggcagagtcacaattagtgcggacgaatccacgagcacaggttacatggaactgagccgcctgagatccgacgacacggccgtttattactgtgcgagagattctggttacattagaggagactactggggccagggaaccctggtcaccgtctcctcag

SEQ ID NO: 3858 - protein, 118 aa, Artificial Sequence
  Description of Artificial Sequence: Synthetic polypeptide
QVQLVQSGAEVKKPGSSVKVSCKASGGTFSNYAISWVRQAPGQGLEWIGGIIPAFGTPKYAHKFQGRVTISADESTSTGYMELSRLRSDDTAVYYCARDSGYIRGDYWGQGTLVTVSS

SEQ ID NO: 3859 - protein, 11 aa, Artificial Sequence
  Description of Artificial Sequence: Synthetic peptide
ARDSGYIRGDY

SEQ ID NO: 3860 - DNA, 322 bp, Artificial Sequence
  Description of Artificial Sequence: Synthetic polynucleotide
  modified_base (131)..(131): a, c, t, g, unknown or other
gacatccagatgacccagtctccatcctccctgtctgcatctgtaggagacagagtcaccatcacttgccaggcgagtcaggggattaacacctatttaaattggtatcagcagaaaccagggaaagcccntaagctcctgatctacgatgcatccaatttggatacaggggtcccttctaggttcagtggaagtgggtctgggacagattttactttcaccatcagcagcctgcagcctgaagatattgcaacatattactgtcaacactatgatagtctgtcactcactttcggcggagggaccaaggtggagctcaaac

SEQ ID NO: 3861 - protein, 107 aa, Artificial Sequence
  Description of Artificial Sequence: Synthetic polypeptide
  MOD_RES (44)..(44): Any amino acid
DIQMTQSPSSLSASVGDRVTITCQASQGINTYLNWYQQKPGKAXKLLIYDASNLDTGVPSRFSGSGSGTDFTFTISSLQPEDIATYYCQHYDSLSLTFGGGTKVELK

SEQ ID NO: 3862 - protein, 9 aa, Artificial Sequence
  Description of Artificial Sequence: Synthetic peptide
QHYDSLSLT

SEQ ID NO: 3863 - DNA, 374 bp, Artificial Sequence
  Description of Artificial Sequence: Synthetic polynucleotide
caggtgcagctggtggagtctgggggaggcgtggtccagcctgggaggtccctgagactctcctgtgcggcgtctggattcaccttcagtagctatggcatgcactgggtccgccaggctccaggcaaggggctggagtgggtggcagttatatggtctgatggaagtaatgaatactatccagactccgtgaagggccgattcaccatctccagagacaattccaagaagacgctgtatctccaaatgaaccgcctgagagccgaggacacggctatatatttctgtgcgagagattattgtgacaatactaactgccaaatcgacaactggttcgaccgctggggccagggaaccctggtcaccgtctcctc

SEQ ID NO: 3864 - protein, 124 aa, Artificial Sequence
  Description of Artificial Sequence: Synthetic polypeptide
QVQLVESGGGVVQPGRSLRLSCAASGFTFSSYGMHWVRQAPGKGLEWVAVIWSDGSNEYYPDSVKGRFTISRDNSKKTLYLQMNRLRAEDTAIYFCARDYCDNTNCQIDNWFDRWGQGTLVTVS

SEQ ID NO: 3865 - protein, 18 aa, Artificial Sequence
  Description of Artificial Sequence: Synthetic peptide
ARDYCDNTNCQIDNWFDR

SEQ ID NO: 3866 - DNA, 322 bp, Artificial Sequence
  Description of Artificial Sequence: Synthetic polynucleotide
gaaatagtgatgacgcagtctccagccaccctgtctgtgtctccaggggaaagagccaccctctcctgcagggccagtcagagtgttagcagcaacttagcctggtaccagcagaaacctggccaggctcccaggctcctcatctatggcgcttcaaccagggccactggtatcccagccaggttcagtggcagtgggtctgggacagaattcactctcaccatcagcagcctgcagtctgaagattttgcagtttattcctgtcagcagtatgattactggcctctcactttcggcggagggaccaaggtggagatcaaac

SEQ ID NO: 3867 - protein, 107 aa, Artificial Sequence
  Description of Artificial Sequence: Synthetic polypeptide
EIVMTQSPATLSVSPGERATLSCRASQSVSSNLAWYQQKPGQAPRLLIYGASTRATGIPARFSGSGSGTEFTLTISSLQSEDFAVYSCQQYDYWPLTFGGGTKVEIK

SEQ ID NO: 3868 - protein, 9 aa, Artificial Sequence
  Description of Artificial Sequence: Synthetic peptide
QQYDYWPLT

SEQ ID NO: 3869 - DNA, 358 bp, Artificial Sequence
  Description of Artificial Sequence: Synthetic polynucleotide
caggtgcagctggtgcagtctggggcagaggtgaagaagcctgggtcctcggtgaaggtctcctgcaagtcttctggaggcatcttcagcaactatgatatcagctgggtgcgacaggcccctggacaagggcttgagtggatgggagggatcatccctctctttgggacagcaaactacgcacagaagttccagggcagactcacaattaccgcggacgaatccacgagcacagcctacatggagttgagtggcctgagagtggacgacacggccgtatattactgtgcgagagatgggggggcagcggcctcctttgactactggggccagggaaccctggtcaccgtctcgtcag

SEQ ID NO: 3870 - protein, 119 aa, Artificial Sequence
  Description of Artificial Sequence: Synthetic polypeptide
QVQLVQSGAEVKKPGSSVKVSCKSSGGIFSNYDISWVRQAPGQGLEWMGGIIPLFGTANYAQKFQGRLTITADESTSTAYMELSGLRVDDTAVYYCARDGGAAASFDYWGQGTLVTVSS

SEQ ID NO: 3871 - protein, 12 aa, Artificial Sequence
  Description of Artificial Sequence: Synthetic peptide
ARDGGAAASFDY

SEQ ID NO: 3872 - DNA, 337 bp, Artificial Sequence
  Description of Artificial Sequence: Synthetic polynucleotide
gatattgtgatgactcagtctccactctccctgcccgtcacccctggagagccggcctccatctcctgcaggtcgagtcagagcctcctgcatagaagtggatacacctatttggcttggtatctgcagaagccagggcagtctccacagctcctgatctatttggcctctaatcgggcctccggggtccctgacaggttcagtggcagtggatcaggcacagattttacactgaaaatcagcagagtggaggctgaggatgttggggtttattactgcatgcaagctctacaaactcctcggacgttcggccaagggaccaaggtggaaatcaaac

SEQ ID NO: 3873 - protein, 112 aa, Artificial Sequence
  Description of Artificial Sequence: Synthetic polypeptide
DIVMTQSPLSLPVTPGEPASISCRSSQSLLHRSGYTYLAWYLQKPGQSPQLLIYLASNRASGVPDRFSGSGSGTDFTLKISRVEAEDVGVYYCMQALQTPRTFGQGTKVEIK

SEQ ID NO: 3874 - protein, 9 aa, Artificial Sequence
  Description of Artificial Sequence: Synthetic peptide
MQALQTPRT

SEQ ID NO: 3875 - DNA, 358 bp, Artificial Sequence
  Description of Artificial Sequence: Synthetic polynucleotide
caggtgcagctggtggagtctgggggaggcgtggtccagcctgggaggtccctgagactctcctgtgcagcctctggattcaccttcagtaactatggcatgcactgggtccgccaggctccaggcaaggggctggagtgggtggcatttatatcatttgatggaagttataaataccatgcagactccgtgaagggccgattcaccatctccagagacaattccaagaacacgctgtatctgcaaatgaacagtctgagagctgaggacacggctgtgtattactgtgcgaaagcctcgggctatggttcggggacagactactggggccagggaagtctggtcaccgtctcctcag

SEQ ID NO: 3876 - protein, 119 aa, Artificial Sequence
  Description of Artificial Sequence: Synthetic polypeptide
QVQLVESGGGVVQPGRSLRLSCAASGFTFSNYGMHWVRQAPGKGLEWVAFISFDGSYKYHADSVKGRFTISRDNSKNTLYLQMNSLRAEDTAVYYCAKASGYGSGTDYWGQGSLVTVSS

SEQ ID NO: 3877 - protein, 12 aa, Artificial Sequence
  Description of Artificial Sequence: Synthetic peptide
AKASGYGSGTDY

SEQ ID NO: 3878 - DNA, 325 bp, Artificial Sequence
  Description of Artificial Sequence: Synthetic polynucleotide
  modified_base (83)..(83): a, c, t, g, unknown or other
gacatccagatgacccagtctccatcctccctgtctgcatctgtaggagacagagtcaccatcacttgccaggcgagtcaggncattagcaactatttaaattggtatcagcagaaaccagggaaagcccctaagctcctgatctacgatgcatccaatttggaaacaggggtcccatcaaggttcagtggaagtggatctgggacagattttactttcaccatcagcagcctgcagcctgaagatattgcaacatattactgtcaaaagtatgataatctccctccgtacacttttggccaggggaccaagctggagatcaaac

SEQ ID NO: 3879 - protein, 108 aa, Artificial Sequence
  Description of Artificial Sequence: Synthetic polypeptide
  MOD_RES (28)..(28): Any amino acid
DIQMTQSPSSLSASVGDRVTITCQASQXISNYLNWYQQKPGKAPKLLIYDASNLETGVPSRFSGSGSGTDFTFTISSLQPEDIATYYCQKYDNLPPYTFGQGTKLEIK

SEQ ID NO: 3880 - protein, 10 aa, Artificial Sequence
  Description of Artificial Sequence: Synthetic peptide
QKYDNLPPYT

SEQ ID NO: 3881 - DNA, 355 bp, Artificial Sequence
  Description of Artificial Sequence: Synthetic polynucleotide
caggtgcagctggtgcagtctggggctgaggtgaggaagcctgggtcctcggtgaaggtctcctgcaaggcttctggaggcaccttcagcaactatgctatcaactgggtgcgacaggcccctggacaagggctggagtggatgggacagctcatccctgtctttggtagtccaaactacgcacagaacttccagggcagagtcacgattaccgcggacagatccacgcgcacagcctacatagaactgaccagcctgagatctgacgacacggccgtttattattgtgcgagagatgatggtttggggagttatggatattggggccagggaaccctggtcaccgtctcctcag

SEQ ID NO: 3882 - protein, 118 aa, Artificial Sequence
  Description of Artificial Sequence: Synthetic polypeptide
QVQLVQSGAEVRKPGSSVKVSCKASGGTFSNYAINWVRQAPGQGLEWMGQLIPVFGSPNYAQNFQGRVTITADRSTRTAYIELTSLRSDDTAVYYCARDDGLGSYGYWGQGTLVTVSS

SEQ ID NO: 3883 - protein, 11 aa, Artificial Sequence
  Description of Artificial Sequence: Synthetic peptide
ARDDGLGSYGY

SEQ ID NO: 3884 - DNA, 337 bp, Artificial Sequence
  Description of Artificial Sequence: Synthetic polynucleotide
gatattgtgatgactcagtctccactctccctgcccgtcacccctggagagccggcctccatctcctgcaggtccagtcagagcctcctgcatagaagtggatacaattatttgggttggtacctgcagaagccagggcagtctccacagctcctgatctatttgggttctaatcgggcctccggggtccctgacagattcagtggcagtggatcaggcacagattttacactgagcatcagcagagtggaggctgaggatgttggggtttattactgcatgcaaactctccaaactcctcacacttttggccaggggaccaagctggagatcaaac

SEQ ID NO: 3885 - protein, 112 aa, Artificial Sequence
  Description of Artificial Sequence: Synthetic polypeptide
DIVMTQSPLSLPVTPGEPASISCRSSQSLLHRSGYNYLGWYLQKPGQSPQLLIYLGSNRASGVPDRFSGSGSGTDFTLSISRVEAEDVGVYYCMQTLQTPHTFGQGTKLEIK

SEQ ID NO: 3886 - protein, 9 aa, Artificial Sequence
  Description of Artificial Sequence: Synthetic peptide
MQTLQTPHT

SEQ ID NO: 3887 - DNA, 376 bp, Artificial Sequence
  Description of Artificial Sequence: Synthetic polynucleotide
caggtgcagctggtgcagtctggggctgaggtgaagaagcctgggtcctcgatgaaggtctcctgcaaggcttctggaggcaccttcagcaactatgcattcacctgggtgcgacaggcccctggacaaggactggagtggatgggaggaatcatccctctctttggaacactgaaatattcacagaaattcctgggcagagtcactattaccgcggacgaatccacgagcacagtctacatggagctgagcagcctgagttctgacgacacggccgtctattactgtgcgagagatcaggattatggttcggggacttattataacggtgtctttcgctactggggccagggaaccctggtcaccgtctcctcag

SEQ ID NO: 3888 - protein, 125 aa, Artificial Sequence
  Description of Artificial Sequence: Synthetic polypeptide
QVQLVQSGAEVKKPGSSMKVSCKASGGTFSNYAFTWVRQAPGQGLEWMGGIIPLFGTLKYSQKFLGRVTITADESTSTVYMELSSLSSDDTAVYYCARDQDYGSGTYYNGVFRYWGQGTLVTVSS

SEQ ID NO: 3889 - protein, 18 aa, Artificial Sequence
  Description of Artificial Sequence: Synthetic peptide
ARDQDYGSGTYYNGVFRY

SEQ ID NO: 3890 - DNA, 325 bp, Artificial Sequence
  Description of Artificial Sequence: Synthetic polynucleotide
gaaattgtgttgacacagtctccagccaccctgtctttgtctccaggggaaagagccaccctctcctgcagggccagtcagagtgctagcatctacttagcctggtaccaacagaaacctggccaggctcccaggctcctcatctatgatgcatccaacagggccactggcatcccagccaggttcagtggcagtgggtctgggacagacttcactctcaccatcagcagcctagaacctgatgattctgcagtttattactgtcagcaacgtgccagctggcctctggtcaccttcggccaagggacacgactggagatcaaac

SEQ ID NO: 3891 - protein, 108 aa, Artificial Sequence
  Description of Artificial Sequence: Synthetic polypeptide
EIVLTQSPATLSLSPGERATLSCRASQSASIYLAWYQQKPGQAPRLLIYDASNRATGIPARFSGSGSGTDFTLTISSLEPDDSAVYYCQQRASWPLVTFGQGTRLEIK

SEQ ID NO: 3892 - protein, 10 aa, Artificial Sequence
  Description of Artificial Sequence: Synthetic peptide
QQRASWPLVT

SEQ ID NO: 3893 - DNA, 358 bp, Artificial Sequence
  Description of Artificial Sequence: Synthetic polynucleotide
caggtgcagctggtgcagtctggggctgaggtgaagaagcctgggtcctcggtgagagtctcctgcaaggcttctggaggaggccccttcagcaactatgctatcaattgggtgcgacaggcccctggacaaggtcttgagtggatgggacggatcatccctcattttggaacaccactctacgcacagagattccaggacagagtcaccattatcgcggacgaatccacgagcacagcttacatgacactgagccgcctgagatctgacgacacggccgtctatttctgtgcgcgagacggtggtttggggagtcttgactactggggccaaggaaccctggtcaccgtctcctcag

SEQ ID NO: 3894 - protein, 119 aa, Artificial Sequence
  Description of Artificial Sequence: Synthetic polypeptide
QVQLVQSGAEVKKPGSSVRVSCKASGGGPFSNYAINWVRQAPGQGLEWMGRIIPHFGTPLYAQRFQDRVTIIADESTSTAYMTLSRLRSDDTAVYFCARDGGLGSLDYWGQGTLVTVSS

SEQ ID NO: 3895 - protein, 11 aa, Artificial Sequence
  Description of Artificial Sequence: Synthetic peptide
ARDGGLGSLDY

SEQ ID NO: 3896 - DNA, 337 bp, Artificial Sequence
  Description of Artificial Sequence: Synthetic polynucleotide
gatattgtgatgactcagtctccactctccctgcccgtcacccctggagagccggcctccatctcctgcaggtctagtcagagcctcctgcatagggatggaaacaactatttggattggtacctgcagaagccagggcagtctccacatctcctgatctatttgggttctaatcgggcctccggggtccctggcaggttcagtggcagtggatcaggcacagattttacactgaaaatcagcagagttgaggctgaggatgttggggtttattactgcatgcaagctctacaaactccgatcaccttcggccaagggacacgactggagattaaac

SEQ ID NO: 3897 - protein, 112 aa, Artificial Sequence
  Description of Artificial Sequence: Synthetic polypeptide
DIVMTQSPLSLPVTPGEPASISCRSSQSLLHRDGNNYLDWYLQKPGQSPHLLIYLGSNRASGVPGRFSGSGSGTDFTLKISRVEAEDVGVYYCMQALQTPITFGQGTRLEIK

SEQ ID NO: 3898 - protein, 9 aa, Artificial Sequence
  Description of Artificial Sequence: Synthetic peptide
MQALQTPIT

SEQ ID NO: 3899 - DNA, 349 bp, Artificial Sequence
  Description of Artificial Sequence: Synthetic polynucleotide
caggtgcagctggtgcagtctggggctgaggtgaagaagcctgggtcctcggtgaaggtctcctgcaaggcttctggagacagtttcaacaactatggtatcaactgggtgcgacaggcccccggacaagggcctgagtggatgggagagatcatccctatctttggtacagcaaactacgcacagaaatttcagggcagagtcacgattaccgcggacaaagccacgaggacagcctacatggacctgaccagcctgacatctgaagacacggccgtatattactgtgcgagaggggtctgggggtgggactactggggccagggaacccgggtcaccgtctcctcag

SEQ ID NO: 3900 - protein, 116 aa, Artificial Sequence
  Description of Artificial Sequence: Synthetic polypeptide
QVQLVQSGAEVKKPGSSVKVSCKASGDSFNNYGINWVRQAPGQGPEWMGEIIPIFGTANYAQKFQGRVTITADKATRTAYMDLTSLTSEDTAVYYCARGVWGWDYWGQGTRVTVSS

SEQ ID NO: 3901 - protein, 9 aa, Artificial Sequence
  Description of Artificial Sequence: Synthetic peptide
ARGVWGWDY

SEQ ID NO: 3902 - DNA, 322 bp, Artificial Sequence
  Description of Artificial Sequence: Synthetic polynucleotide
gaaattgtgttgacgcagtctccaggcaccctgtctttgtctccaggggaaagagccaccctctcctgcagggccagtcagactgttaacagcgactactttgcctggtaccggcagaaacctggccaggctcccatgctcctcatctatggtgcatccaccagggccactggcatcccagacaggttcagtggcagtgggtctgggacagacttcactctcaccatcagcagactggagcctgaagattttgcagtctattactgtcagcaatatggtagctctccccggacgttcggccaagggaccaaggtggaagtca

SEQ ID NO: 3903 - protein, 107 aa, Artificial Sequence
  Description of Artificial Sequence: Synthetic polypeptide
EIVLTQSPGTLSLSPGERATLSCRASQTVNSDYFAWYRQKPGQAPMLLIYGASTRATGIPDRFSGSGSGTDFTLTISRLEPEDFAVYYCQQYGSSPRTFGQGTKVEV

SEQ ID NO: 3904 - protein, 9 aa, Artificial Sequence
  Description of Artificial Sequence: Synthetic peptide
QQYGSSPRT

SEQ ID NO: 3905 - DNA, 367 bp, Artificial Sequence
  Description of Artificial Sequence: Synthetic polynucleotide
gaggtgcagctggtggagtctgggggaggcttggtccagccgggggggtccctgagactctcctgtgcagcctctggattcaccgtcagtaacaactatatgacctgggtccgccaggctccagggaaggggctagagtgggtctcagttatttatggcggaagtagtacatactacgcagactccgtgaaggggagattcaccatctccagagacgattcgaagaacaccctgtatcttcaactgaacagcctgagagccgaggacacggctgtctattactgtgcgaggtggggctgggataggagtggtcattactactcctttgactactggggccaaggaaccctggtcaccgtctcctcag

SEQ ID NO: 3906 - protein, 122 aa, Artificial Sequence
  Description of Artificial Sequence: Synthetic polypeptide
EVQLVESGGGLVQPGGSLRLSCAASGFTVSNNYMTWVRQAPGKGLEWVSVIYGGSSTYYADSVKGRFTISRDDSKNTLYLQLNSLRAEDTAVYYCARWGWDRSGHYYSFDYWGQGTLVTVSS

SEQ ID NO: 3907 - protein, 16 aa, Artificial Sequence
  Description of Artificial Sequence: Synthetic peptide
ARWGWDRSGHYYSFDY

SEQ ID NO: 3908 - DNA, 325 bp, Artificial Sequence
  Description of Artificial Sequence: Synthetic polynucleotide
gaaattgtgttgacacagtctccagccaccctgtctttgtctccaggggaaagagccaccctctcctgcagggccagtgagagtgttggcagctacttagcctggtaccagcagaaacctggccaggctcccaggctcctcatctatgatgcatccaacagggccactggcatcccagccaggttcagtggcagtgggtctgggacagacttcactctcaccatcagcagcctagagcctgaagattttgtagtttattactgtcagcagcgtagcaactggcctccgtacacttttggccaggggaccaagctggagatcaaac

SEQ ID NO: 3909 - protein, 108 aa, Artificial Sequence
  Description of Artificial Sequence: Synthetic polypeptide
EIVLTQSPATLSLSPGERATLSCRASESVGSYLAWYQQKPGQAPRLLIYDASNRATGIPARFSGSGSGTDFTLTISSLEPEDFVVYYCQQRSNWPPYTFGQGTKLEIK

SEQ ID NO: 3910 - protein, 10 aa, Artificial Sequence
  Description of Artificial Sequence: Synthetic peptide
QQRSNWPPYT

SEQ ID NO: 3911 - DNA, 357 bp, Artificial Sequence
  Description of Artificial Sequence: Synthetic polynucleotide
caggtgcagctggtggagtctgggggaggcgtggtccagcctgggaggtccctgagactctcctgtaaagcctcgggattcatcttcagtaactatgccatgctctgggtccgccaggttccaggcaaggggctggagtgggtggcagttatttcacatgatggaagtgataaaaattatgcagactccgtgaagggccgattcaccatctccagagacaattccaagagcacgttctatctgcaaatgaacagcctgagagtcgaggacacggctgtgtattactgtgcgaaagatggcccagacagttatggtttcgtgaactacattgattactggggccagggaaccctggtc

SEQ ID NO: 3912 - protein, 119 aa, Artificial Sequence
  Description of Artificial Sequence: Synthetic polypeptide
QVQLVESGGGVVQPGRSLRLSCKASGFIFSNYAMLWVRQVPGKGLEWVAVISHDGSDKNYADSVKGRFTISRDNSKSTFYLQMNSLRVEDTAVYYCAKDGPDSYGFVNYIDYWGQGTLV

SEQ ID NO: 3913 - protein, 16 aa, Artificial Sequence
  Description of Artificial Sequence: Synthetic peptide
AKDGPDSYGFVNYIDY

SEQ ID NO: 3914 - DNA, 322 bp, Artificial Sequence
  Description of Artificial Sequence: Synthetic polynucleotide
gaaattgtgttgacacagtctccagccaccctgtctttgtctccaggggaaagagccaccctctcctgcagggccagtcagagtgtcatcacctacttagcctggtaccaacagaaacctggccaggctcccaggctcctcatctatgatgcagccagcagggccactggcatcccagccaggttcattggcagtgggtctgggacagacttcactctcaccatcagcagcctagagcctgaagattttgcagtttattactgtcagcagcgcagctactggcctctcactttcggccctgggaccaaagtggatatcaaac

SEQ ID NO: 3915 - protein, 107 aa, Artificial Sequence
  Description of Artificial Sequence: Synthetic polypeptide
EIVLTQSPATLSLSPGERATLSCRASQSVITYLAWYQQKPGQAPRLLIYDAASRATGIPARFIGSGSGTDFTLTISSLEPEDFAVYYCQQRSYWPLTFGPGTKVDIK

SEQ ID NO: 3916 - protein, 9 aa, Artificial Sequence
  Description of Artificial Sequence: Synthetic peptide
QQRSYWPLT

SEQ ID NO: 3917 - DNA, 360 bp, Artificial Sequence
  Description of Artificial Sequence: Synthetic polynucleotide
gaggtgcagctggtggagtctggaggaggcttgatccagcctggggggtccctgagactctcctgtgcagcctctgggttcaccgtcattagcaactacatgagctgggtccgccaggctccagggaaggggctggagtgggtctcagtaatttatagtcatattaggacagactacgcagactccgtgaagggccgattcaccatctccagagacaattccaagaacacgttgtatcttcaaatgcatagcctgagagccgaggacacggccgtctattactgtgcgagaagtcttagtaacagctgggctaggggtatggacgtctggggccatgggaccacggtcaccgtctcctca

SEQ ID NO: 3918 - protein, 120 aa, Artificial Sequence
  Description of Artificial Sequence: Synthetic polypeptide
EVQLVESGGGLIQPGGSLRLSCAASGFTVISNYMSWVRQAPGKGLEWVSVIYSHIRTDYADSVKGRFTISRDNSKNTLYLQMHSLRAEDTAVYYCARSLSNSWARGMDVWGHGTTVTVSS

SEQ ID NO: 3919 - protein, 14 aa, Artificial Sequence
  Description of Artificial Sequence: Synthetic peptide
ARSLSNSWARGMDV

SEQ ID NO: 3920 - DNA, 325 bp, Artificial Sequence
  Description of Artificial Sequence: Synthetic polynucleotide
gacatccagatgacccagtctccatcctccctgtctgcatctgtaggagacagagtcaccatcacttgccaggcgagtcaggacattagcaactatttaaattggtatcagcagaaaccagggaaagcccctaagctcctgatctacgatgcatccaatttggaaacaggggtcccatcaaggttcagtggaagtggatctgggacagattttactctcaccatcagcagcctgcagcctgaagacattgcaacatattactgtcaacagtatgataacttctctttcttcactttcgcccctgggaccaaagtggatatcaaac

SEQ ID NO: 3921 - protein, 108 aa, Artificial Sequence
  Description of Artificial Sequence: Synthetic polypeptide
DIQMTQSPSSLSASVGDRVTITCQASQDISNYLNWYQQKPGKAPKLLIYDASNLETGVPSRFSGSGSGTDFTLTISSLQPEDIATYYCQQYDNFSFFTFAPGTKVDIK

SEQ ID NO: 3922 - protein, 10 aa, Artificial Sequence
  Description of Artificial Sequence: Synthetic peptide
QQYDNFSFFT

SEQ ID NO: 3923 - DNA, 370 bp, Artificial Sequence
  Description of Artificial Sequence: Synthetic polynucleotide
caggtgcagctgcaggagtcgggcccaggactggtgaagccttcggagaccctgtccctcacctgcactgtctctggtggctccatcagtacgtactactggagctggatccggcagcccccagggaagggactggagtggattgcgtatatctattatagtgggagcaccaactacaacccctccctcaagagtcgagtcaccatatcagtagacacgtccaagagccagttctccctgaagctgagctctgtgaccgccgcagacacggccgtatattactgtgcgagactacgctatggttcggggaattatcccctcgatgtttttgatatctggggccaggggacaatggtcaccgtctcttcag

SEQ ID NO: 3924 - protein, 123 aa, Artificial Sequence
  Description of Artificial Sequence: Synthetic polypeptide
QVQLQESGPGLVKPSETLSLTCTVSGGSISTYYWSWIRQPPGKGLEWIAYIYYSGSTNYNPSLKSRVTISVDTSKSQFSLKLSSVTAADTAVYYCARLRYGSGNYPLDVFDIWGQGTMVTVSS

SEQ ID NO: 3925 - protein, 17 aa, Artificial Sequence
  Description of Artificial Sequence: Synthetic peptide
ARLRYGSGNYPLDVFDI

SEQ ID NO: 3926 - DNA, 322 bp, Artificial Sequence
  Description of Artificial Sequence: Synthetic polynucleotide
gacatccagatgacccagtctccattctccctgtctgcatctgtaggagacagagtcaccatcacttgccaggcgagtcaggacattagcaactatttaaattggtatcagcagaaaccagggaaagcccctaagctcctgatctacgatgtatcaaatttgcaaacaggggtcccattaaggttcagtggaagtggatctgggacagattttactttcaccatcagtagcctgcagcctgaagacattgcaacatattactgtcaacagtatgataatttctcattcactttcggccctgggaccaaagtggatatcaaac

SEQ ID NO: 3927 - protein, 107 aa, Artificial Sequence
  Description of Artificial Sequence: Synthetic polypeptide
DIQMTQSPFSLSASVGDRVTITCQASQDISNYLNWYQQKPGKAPKLLIYDVSNLQTGVPLRFSGSGSGTDFTFTISSLQPEDIATYYCQQYDNFSFTFGPGTKVDIK

SEQ ID NO: 3928 - protein, 9 aa, Artificial Sequence
  Description of Artificial Sequence: Synthetic peptide
QQYDNFSFT

SEQ ID NO: 3929 - DNA, 364 bp, Artificial Sequence
  Description of Artificial Sequence: Synthetic polynucleotide
caaatgcagctggtgcagtctgggcctgaggtgaagaagcctgggacctcagtgaaggtctcctgcaaggcgtctggattcgtattcaaaacctctgctatgcagtgggtgcgacaggctcgtggacaacggcttgagtggataggatggatcgtcgttggcagtggttacacacactacgcacagaagttccagggaagagtcaccattaccagggacatgtccacaagcacaacctacatggagctgagtagcctgagatccgaggacacggccatatattactgtgcggcagatattagagaaggatgggggggaccttctgactattggggccagggaaccctggtcaccgtctcctcag

SEQ ID NO: 3930 - protein, 121 aa, Artificial Sequence
  Description of Artificial Sequence: Synthetic polypeptide
QMQLVQSGPEVKKPGTSVKVSCKASGFVFKTSAMQWVRQARGQRLEWIGWIVVGSGYTHYAQKFQGRVTITRDMSTSTTYMELSSLRSEDTAIYYCAADIREGWGGPSDYWGQGTLVTVSS

SEQ ID NO: 3931 - protein, 14 aa, Artificial Sequence
  Description of Artificial Sequence: Synthetic peptide
AADIREGWGGPSDY

SEQ ID NO: 3932 - DNA, 325 bp, Artificial Sequence
  Description of Artificial Sequence: Synthetic polynucleotide
gaaattgtgttgacgcagtctccaggcaccctgtctttgtctccaggggaaagagccaccctctcctgcagggccagtcagagtgttagcaacagctacttagcctggtaccagcagaaacctggccaggctcccaggctcctcatctatggtgcatccagcaggcccactggcatcccagacaagttcagtggcagtgggtctgggacagacttcactctcaccatcagcagactggagcctgaagattttgcagtatattactgtcaacagtatggtagctcaccactcactttcggcggagggaccaaggtggagatcaaac

SEQ ID NO: 3933 - protein, 108 aa, Artificial Sequence
  Description of Artificial Sequence: Synthetic polypeptide
EIVLTQSPGTLSLSPGERATLSCRASQSVSNSYLAWYQQKPGQAPRLLIYGASSRPTGIPDKFSGSGSGTDFTLTISRLEPEDFAVYYCQQYGSSPLTFGGGTKVEIK

SEQ ID NO: 3934 - protein, 9 aa, Artificial Sequence
  Description of Artificial Sequence: Synthetic peptide
QQYGSSPLT

SEQ ID NO: 3935 - DNA, 352 bp, Artificial Sequence
  Description of Artificial Sequence: Synthetic polynucleotide
caggttcagctggtgcagtctggagctgaagtgaagaagcctggggcctcagtgaaggtctcctgcaagacttctggttacacctttacccattatggtgtcaactgggtgcgacaggcccctggacaagggcttgagtgggtgggatggatcgccggttacaatggtgacacaaactatgcacagaagttccagggcagagtcaccctgaccacacacacatccacgaacacagcctacatggaactgaggagcctgaaatctgacgacacggccgtgtacttctgtgcgagagccgggggatatagcggaggctactggggccagggaaccctggtcaccgtctcctcag

SEQ ID NO: 3936 - protein, 117 aa, Artificial Sequence; identical to SEQ ID NO: 31
  Description of Artificial Sequence: Synthetic polypeptide

SEQ ID NO: 3937 - protein, 10 aa, Artificial Sequence
  Description of Artificial Sequence: Synthetic peptide
ARAGGYSGGY

SEQ ID NO: 3938 - DNA, 322 bp, Artificial Sequence
  Description of Artificial Sequence: Synthetic polynucleotide
gacatccagatgacccagtctccatcctccctgtctgcatctgtaggagacagagtcaccatcacttgccaggcgagtcaggacattcgcaactatttacattggtatcagcagaaaccagggaaagcccctaagctcctgatctacgatgcatccaatttggaaacaggggtcccatcaaggttcactggaagtggatctgggacagattttactttcaccatcgacagcctgcagcctgaagatattgcaacatattactgtcaacagtatgataataaccgtctcactttcggcggagggaccaaggtggagatcaaac

SEQ ID NO: 3939 - protein, 107 aa, Artificial Sequence
  Description of Artificial Sequence: Synthetic polypeptide
DIQMTQSPSSLSASVGDRVTITCQASQDIRNYLHWYQQKPGKAPKLLIYDASNLETGVPSRFTGSGSGTDFTFTIDSLQPEDIATYYCQQYDNNRLTFGGGTKVEIK

SEQ ID NO: 3940 - protein, 9 aa, Artificial Sequence
  Description of Artificial Sequence: Synthetic peptide
QQYDNNRLT

SEQ ID NO: 3941 - DNA, 349 bp, Artificial Sequence
  Description of Artificial Sequence: Synthetic polynucleotide
caggttcagctggtgcagtctggagctgaggtgaagaagcctggggcctcagtgaaggtctcctgcaaggcttctggttacacctttacgcactatggtatcagctgggtgcgacaggcccctggacaaggccttgagtggatgggatggatcagcgcttacaatggtgacacaaactatgcacagaagttccagggcagagtcaccttgaccacagacacatccacgagcacagcgtacatggaattgaggagcctgagatctgacgacacggccgtctattactgtgcgagagccggggggttcgggacctactggggccagggaaccctggtcgccgtctcctcag

SEQ ID NO: 3942 - protein, 116 aa, Artificial Sequence
  Description of Artificial Sequence: Synthetic polypeptide
QVQLVQSGAEVKKPGASVKVSCKASGYTFTHYGISWVRQAPGQGLEWMGWISAYNGDTNYAQKFQGRVTLTTDTSTSTAYMELRSLRSDDTAVYYCARAGGFGTYWGQGTLVAVSS

SEQ ID NO: 3943 - protein, 9 aa, Artificial Sequence
  Description of Artificial Sequence: Synthetic peptide
ARAGGFGTY

SEQ ID NO: 3944 - DNA, 322 bp, Artificial Sequence
  Description of Artificial Sequence: Synthetic polynucleotide
gacatccagatgacccagtctccatcctccctgtctgcatctgtaggagacagagtcaccatcacttgccaggcgagtcaggacattagcaactatttaaattggtatcagcagataccagggaaagcccctaaactcctgatctacgatgcatccactttggagccaggggtcccatcaaggttcagtgggagtggatctgggacacactttactctcaccatcagcggcctgcagcctgaagatattgcaacatattactgtcaacagtttgataaactctcgtggacgttcggccaagggaccaaggtggaactcaaac

SEQ ID NO: 3945 - protein, 107 aa, Artificial Sequence
  Description of Artificial Sequence: Synthetic polypeptide
DIQMTQSPSSLSASVGDRVTITCQASQDISNYLNWYQQIPGKAPKLLIYDASTLEPGVPSRFSGSGSGTHFTLTISGLQPEDIATYYCQQFDKLSWTFGQGTKVELK

SEQ ID NO: 3946 - protein, 9 aa, Artificial Sequence
  Description of Artificial Sequence: Synthetic peptide
QQFDKLSWT

SEQ ID NO: 3947 - DNA, 353 bp, Artificial Sequence
  Description of Artificial Sequence: Synthetic polynucleotide
caggtgcagctggtgcagtctggggctgaggtgaagaagcctgggtcctcggtgaaggtctcctgcaaggcttctggaggcaccttcagcaactatgctatcaactgggtgcgacaggcccctggacaagggctcgagtggatgggagggatcatccctttctttgatacaccgaactacgcgcagaagttccagaccagagtctcaattaccgcggacaaatccacgagcacagcctacatggaactgagcagcctgacatctgaggacacggccgtttattactgtgcgagagacggtgggactaccctttttgactactggggccagggaaccctggtcaccgtctcctc

SEQ ID NO: 3948 - protein, 117 aa, Artificial Sequence
  Description of Artificial Sequence: Synthetic polypeptide
QVQLVQSGAEVKKPGSSVKVSCKASGGTFSNYAINWVRQAPGQGLEWMGGIIPFFDTPNYAQKFQTRVSITADKSTSTAYMELSSLTSEDTAVYYCARDGGTTLFDYWGQGTLVTVS

SEQ ID NO: 3949 - protein, 11 aa, Artificial Sequence
  Description of Artificial Sequence: Synthetic peptide
ARDGGTTLFDY

SEQ ID NO: 3950 - DNA, 337 bp, Artificial Sequence
  Description of Artificial Sequence: Synthetic polynucleotide
gatgttgtgatgactcagtctccactctccctggccgtcacccttggacagccggcctccatctcctgcaggtctagtcaaagcctcgtgcaccgtgatggaaacacctacttgaattggtttcagcagaggccaggccaatctccaaggcgcctaatttatcaggtttctaatcgggactctggggtcccagacagattcagcggcagtgggtcaggcactgatttcacactgaaaatcagcagggtggaggctgaggatattgggatttattactgcatgcaaggtatatacaggccttacacttttggccaggggaccaagctggagatcaaac

SEQ ID NO: 3951 - protein, 112 aa, Artificial Sequence
  Description of Artificial Sequence: Synthetic polypeptide
DVVMTQSPLSLAVTLGQPASISCRSSQSLVHRDGNTYLNWFQQRPGQSPRRLIYQVSNRDSGVPDRFSGSGSGTDFTLKISRVEAEDIGIYYCMQGIYRPYTFGQGTKLEIK

SEQ ID NO: 3952 - protein, 9 aa, Artificial Sequence
  Description of Artificial Sequence: Synthetic peptide
MQGIYRPYT

SEQ ID NO: 3953 - DNA, 358 bp, Artificial Sequence
  Description of Artificial Sequence: Synthetic polynucleotide
caggtgcagctggtggagtctgggggaggcgtggtccggcctgggaggtccctgagactctcctgtgcagcgtctggattcaccttcggtcactatggcatgcactgggtccgccaggctccaggcaaggggctggagtgggtggcagttatatggtttgatggaagttataaatactatgcagaatccgtgaagggccgattcaccatctccagagacaattccaagaacactctgtatctgcaaatgaacagcgtgagagccgaggacacggctgtgtattactgtgcgagcctatctggggtcagtggctactttgactactggggccagggaaccctggtcaccgtctcctcag

SEQ ID NO: 3954 - protein, 119 aa, Artificial Sequence
  Description of Artificial Sequence: Synthetic polypeptide
QVQLVESGGGVVRPGRSLRLSCAASGFTFGHYGMHWVRQAPGKGLEWVAVIWFDGSYKYYAESVKGRFTISRDNSKNTLYLQMNSVRAEDTAVYYCASLSGVSGYFDYWGQGTLVTVSS

SEQ ID NO: 3955 - protein, 12 aa, Artificial Sequence
  Description of Artificial Sequence: Synthetic peptide
ASLSGVSGYFDY

SEQ ID NO: 3956 - DNA, 325 bp, Artificial Sequence
  Description of Artificial Sequence: Synthetic polynucleotide
gacatccagatgacccagtctccatcctccctgtctgcatctgttggagacagagtcaccatcacttgccaggcgagtcaggacatcagtaactatttaaattggtatcagcagaaaccagggaaagcccctaagctcctgatctacgatgcatccaatttggaaacaggggtcccatcaaggttcagtggaggtggatctgggacacattttactttcaccatcagcagcctgcagcctgaagatattgcaacatattactgtctacagtatgataatgtccctccgtacacttttggccaggggaccagtctggagatcaaac

SEQ ID NO: 3957 - protein, 108 aa, Artificial Sequence
  Description of Artificial Sequence: Synthetic polypeptide
DIQMTQSPSSLSASVGDRVTITCQASQDISNYLNWYQQKPGKAPKLLIYDASNLETGVPSRFSGGGSGTHFTFTISSLQPEDIATYYCLQYDNVPPYTFGQGTSLEIK

SEQ ID NO: 3958 - protein, 10 aa, Artificial Sequence
  Description of Artificial Sequence: Synthetic peptide
LQYDNVPPYT

SEQ ID NO: 3959 - DNA, 353 bp, Artificial Sequence
  Description of Artificial Sequence: Synthetic polynucleotide
caggtgcagctggtgcagtctggggctgaggtgaagaagcctgggtcctcggtgaaggtctcctgcaagacttctggaggcaccttcagcaactatgctattaactgggtgcgacaggcccccggacaggggcttgagtggatgggagggatcatccctatctttggtacaccaaactacgcacagaagttccaggccagagtcacagtaaccgcggacagatccacgagcacagcctacatggagctgaccagcctgacttctgacgacacggccgtctattactgtgcgagagacggtggtttggggagttttgactactggggccagggaacccaggtcaccgtctcctc

SEQ ID NO: 3960 - protein, 117 aa, Artificial Sequence
  Description of Artificial Sequence: Synthetic polypeptide
QVQLVQSGAEVKKPGSSVKVSCKTSGGTFSNYAINWVRQAPGQGLEWMGGIIPIFGTPNYAQKFQARVTVTADRSTSTAYMELTSLTSDDTAVYYCARDGGLGSFDYWGQGTQVTVS

SEQ ID NO: 3961 - protein, 11 aa, Artificial Sequence
  Description of Artificial Sequence: Synthetic peptide
ARDGGLGSFDY

SEQ ID NO: 3962 - DNA, 337 bp, Artificial Sequence
  Description of Artificial Sequence: Synthetic polynucleotide
  modified_base (22)..(22): a, c, t, g, unknown or other
  modified_base (25)..(25): a, c, t, g, unknown or other
gatattgtgatgactcagtctncantctccctgcccgtcactcctggagagccggcctccatctcctgcaggtctagtcagagcctcctgcatagagatggaaacaactatttggattggtacctgcagaagccggggcagtctccacagctcctgatctattggggttctaatcgggcctccggggtccctgacaggttcagtggcagtggatcaggcacagattttatactgaagatcagcagagtggaggctgaggatgttgggctttattactgcatgcaacctctacaaactccgtacacttttggccaggggaccaagctggagatcaaac

SEQ ID NO: 3963 - protein, 112 aa, Artificial Sequence
  Description of Artificial Sequence: Synthetic polypeptide
  MOD_RES (8)..(9): Any amino acid
DIVMTQSXXSLPVTPGEPASISCRSSQSLLHRDGNNYLDWYLQKPGQSPQLLIYWGSNRASGVPDRFSGSGSGTDFILKISRVEAEDVGLYYCMQPLQTPYTFGQGTKLEIK

SEQ ID NO: 3964 - protein, 9 aa, Artificial Sequence
  Description of Artificial Sequence: Synthetic peptide
MQPLQTPYT

SEQ ID NO: 3965 - DNA, 355 bp, Artificial Sequence
  Description of Artificial Sequence: Synthetic polynucleotide
caggtgcagctggtgcagtctgggactgaggtgaagaagcctgggtcctcggtaaaggtctcctgcaaggcttctgggggctccttcagcaactatgctatcagctgggtgcggcaggcccctggacaagggcttgagtggatgggagggatcctccctgtctttggtacaaaaaagtacgcacagaagttccaggacagagtcacgataaccgcggacgattccacgagcacggcctacatggagctgaggagcctgagatctgaggacacggccgtgtatttctgtgcgagagattccggttatattagaggagactactggggccagggaaccctggtcaccgtctcctcag

SEQ ID NO: 3966 - protein, 118 aa, Artificial Sequence
  Description of Artificial Sequence: Synthetic polypeptide
QVQLVQSGTEVKKPGSSVKVSCKASGGSFSNYAISWVRQAPGQGLEWMGGILPVFGTKKYAQKFQDRVTITADDSTSTAYMELRSLRSEDTAVYFCARDSGYIRGDYWGQGTLVTVSS

SEQ ID NO: 3967 - protein, 11 aa, Artificial Sequence
  Description of Artificial Sequence: Synthetic peptide
ARDSGYIRGDY

SEQ ID NO: 3968 - DNA, 322 bp, Artificial Sequence
  Description of Artificial Sequence: Synthetic polynucleotide
gacatccagatgacccagtctccatcctccctgtctgcatctgtaggagacagagtcaccatcacttgccaggcgagtcaggacagtaagaaccatgtaaattggtatcagcagaaaccagggaaagcccctaagctcctgatctacgaggcatctaatttggaagcgggggtcccatcaaggttcagtggaagtggatctgggacagattttagtttcaccatcagcagcctgcagcctgaagattttgcaacatattactgtctacactatgattctctcgcgctcactttcggcggagggaccaaggtggagatcaaac

SEQ ID NO: 3969 - protein, 107 aa, Artificial Sequence
  Description of Artificial Sequence: Synthetic polypeptide
DIQMTQSPSSLSASVGDRVTITCQASQDSKNHVNWYQQKPGKAPKLLIYEASNLEAGVPSRFSGSGSGTDFSFTISSLQPEDFATYYCLHYDSLALTFGGGTKVEIK

SEQ ID NO: 3970 - protein, 9 aa, Artificial Sequence
  Description of Artificial Sequence: Synthetic peptide
LHYDSLALT

SEQ ID NO: 3971 - DNA, 352 bp, Artificial Sequence
  Description of Artificial Sequence: Synthetic polynucleotide
caggtgcagctggtgcagtctggggctgaggtgaagaagcctgggtcctcggtgaaggtctcctgcaagacttctggaggcaccttcggcacctatactatcgcctgggtgcgacaggcccctggacaaggacttgagtggatgggagggctcatccctgtctttggaacaccaaactacgcacggaagttccagggcagactcactattaccgcggacagatccacgagcacagcctacatggagttgagcagcctgggatctgaggacacggccgtttattattgtgcgaggcggggtggctggggattggactactggggccagggcaccctggtcatcgtctcttcag

SEQ ID NO: 3972 - protein, 117 aa, Artificial Sequence
  Description of Artificial Sequence: Synthetic polypeptide
QVQLVQSGAEVKKPGSSVKVSCKTSGGTFGTYTIAWVRQAPGQGLEWMGGLIPVFGTPNYARKFQGRLTITADRSTSTAYMELSSLGSEDTAVYYCARRGGWGLDYWGQGTLVIVSS

SEQ ID NO: 3973 - protein, 10 aa, Artificial Sequence
  Description of Artificial Sequence: Synthetic peptide
ARRGGWGLDY

SEQ ID NO: 3974 - DNA, 322 bp, Artificial Sequence
  Description of Artificial Sequence: Synthetic polynucleotide
gacatccagatgacccagtctccatcctccctgtctgcagctgtaggagacagagtcaccatcacttgccaggcgagtcaggacattagcaactatgtaaattggtatcagcaaaaaccagggaaagcccctaagatcctgatctacgatgcatccaatttggaaacaggggtcccatcaagattcagtggaagtggatctgggacatattttactttcaccatcagcagcctgcagcctgaagatattgcaacatattactgtcaacagtatgataatctccgtctcactttcggcggagggaccaaggtggaggtcaaac

SEQ ID NO: 3975 - protein, 107 aa, Artificial Sequence
  Description of Artificial Sequence: Synthetic polypeptide
DIQMTQSPSSLSAAVGDRVTITCQASQDISNYVNWYQQKPGKAPKILIYDASNLETGVPSRFSGSGSGTYFTFTISSLQPEDIATYYCQQYDNLRLTFGGGTKVEVK

SEQ ID NO: 3976 - protein, 9 aa, Artificial Sequence
  Description of Artificial Sequence: Synthetic peptide
QQYDNLRLT

SEQ ID NO: 3977 - DNA, 349 bp, Artificial Sequence
  Description of Artificial Sequence: Synthetic polynucleotide
caggtgcagctggtgcagtctggggctgaggtgaagaggcctgggtcctcggtgaaggtctcctgcaagggttctggaggcaccttcaacaactatgccatcaactgggtgcgacaggcccctggacaagggcttgagtggatgggagggatcatccctacctttggtacaccaaactacgcgcagaaattccagggcagagtcaccattaccgcggacaaatccacggtcacagcctacttggaactgagcagcctgagatctgacgacacggccaaatattactgtgcgagacttacctgggggtttgactactggggccagggaaccctggtcaccgtctcctcag

SEQ ID NO: 3978 - protein, 116 aa, Artificial Sequence
  Description of Artificial Sequence: Synthetic polypeptide
QVQLVQSGAEVKRPGSSVKVSCKGSGGTFNNYAINWVRQAPGQGLEWMGGIIPTFGTPNYAQKFQGRVTITADKSTVTAYLELSSLRSDDTAKYYCARLTWGFDYWGQGTLVTVSS

SEQ ID NO: 3979 - protein, 9 aa, Artificial Sequence
  Description of Artificial Sequence: Synthetic peptide
ARLTWGFDY

SEQ ID NO: 3980 - DNA, 325 bp, Artificial Sequence
  Description of Artificial Sequence: Synthetic polynucleotide
gaaattgtgttgacgcagtctccaggcaccctgtctttgtctccaggggaaagagccaccctctcctgcagggccagtcagagtgttaacagcgactacttagcctggtaccagcagaaacctggccaggctcccagactcctcatctatggtgcatccgccagggccactggcatcccagacaggttcagtggcagtgggtctgggacagacttcgctctcaccatcagcagactggagcctgaagattttgcagtgtattactgtcaccactatggtagttcacctcagacgttcggccaagggaccagggtggaaatcaaac

SEQ ID NO: 3981 - protein, 108 aa, Artificial Sequence
  Description of Artificial Sequence: Synthetic polypeptide
EIVLTQSPGTLSLSPGERATLSCRASQSVNSDYLAWYQQKPGQAPRLLIYGASARATGIPDRFSGSGSGTDFALTISRLEPEDFAVYYCHHYGSSPQTFGQGTRVEIK

SEQ ID NO: 3982 - protein, 9 aa, Artificial Sequence
  Description of Artificial Sequence: Synthetic peptide
HHYGSSPQT

SEQ ID NO: 3983 - DNA, 349 bp, Artificial Sequence
  Description of Artificial Sequence: Synthetic polynucleotide
caggtgcagctggtgcagtctggggctgaggtgaagaagcctgggtcctcggtgaaggtctcctgcaaggcttctggaggcaccttcagcaactatgaaatcagttgggtgcgacaggcccctggacaagggcttgagtggatgggagggatcatccctgtctttggaacaccaaagtacgctcagaagttccagggcagggtcaccattaccgcggacagatccacgagcacagcctacatggagctgagcagcctgacatctgaagacacggccgtctattattgtgcgaaattcgtgtgggggtatgacccgtggggccagggaaccctggtcaccgtctcctcag

SEQ ID NO: 3984 - protein, 116 aa, Artificial Sequence
  Description of Artificial Sequence: Synthetic polypeptide
QVQLVQSGAEVKKPGSSVKVSCKASGGTFSNYEISWVRQAPGQGLEWMGGIIPVFGTPKYAQKFQGRVTITADRSTSTAYMELSSLTSEDTAVYYCAKFVWGYDPWGQGTLVTVSS

SEQ ID NO: 3985 - protein, 9 aa, Artificial Sequence
  Description of Artificial Sequence: Synthetic peptide
AKFVWGYDP

SEQ ID NO: 3986 - DNA, 322 bp, Artificial Sequence
  Description of Artificial Sequence: Synthetic polynucleotide
gaaattgtgttgacgcagtctccaggcaccctgtctttgtctccaggggaaagagccaccctctcctgcagggccagtcagagtgttaacagcgactacttagcctggtaccagcagaaacctggcctgcctcccaggctcctcatctatggtgcatccggcagggccactggcatcccagacaggttcagtggcagtgggtctgggacagacttcactctcaccatcaacagactggagcctgaagattttgcagtgtattactgtcagcaatatggtacctccccgacgttcggccaggggaccaaggtggaaatcaaac

SEQ ID NO: 3987 - protein, 107 aa, Artificial Sequence
  Description of Artificial Sequence: Synthetic polypeptide
EIVLTQSPGTLSLSPGERATLSCRASQSVNSDYLAWYQQKPGLPPRLLIYGASGRATGIPDRFSGSGSGTDFTLTINRLEPEDFAVYYCQQYGTSPTFGQGTKVEIK

SEQ ID NO: 3988 - protein, 8 aa, Artificial Sequence
  Description of Artificial Sequence: Synthetic peptide
QQYGTSPT

SEQ ID NO: 3989 - DNA, 355 bp, Artificial Sequence
  Description of Artificial Sequence: Synthetic polynucleotide
caggtgcagctggtgcagtctggggccgaggttaagaagcctgggtcctcggtgacggtctcctgcaaggcttctggaggcaccttcagtcactatggtatcaactgggtgcgacaggcccctggacaagggcttgagtggatgggagggatcatccctatatttggaacaacaaactacgcacagaagttccagggcagagtcacaattaccgcggacgcattcacgagcacagccttcatggaactgagcggcctgacctctcacgacacggccgtttattactgtgccagagaaatgggttctactgggggggcctactggggccagggaaccctggtcaccgtctccgcag

SEQ ID NO: 3990 - protein, 118 aa, Artificial Sequence
  Description of Artificial Sequence: Synthetic polypeptide
QVQLVQSGAEVKKPGSSVTVSCKASGGTFSHYGINWVRQAPGQGLEWMGGIIPIFGTTNYAQKFQGRVTITADAFTSTAFMELSGLTSHDTAVYYCAREMGSTGGAYWGQGTLVTVSA

SEQ ID NO: 3991 - protein, 11 aa, Artificial Sequence
  Description of Artificial Sequence: Synthetic peptide
AREMGSTGGAY

SEQ ID NO: 3992 - DNA, 322 bp, Artificial Sequence
  Description of Artificial Sequence: Synthetic polynucleotide
gacatccagatgacccagtctccatcctccctgtctgcatctgtaggagacagagtcaccatcacttgccaggcgagtcaggacattagaaactatttaaattggtatcagcagaaaccagggaaagcccctaagctcctgatcttcgatgcatccaatttggaaacaggggtcccacgaaggttcagtggaagtggatctgggacagattttactttcaccatcagcaccctgcagcctgaagatattgcaacatattactgtcaacagtatggtaatctccagtacacttttggccaggggaccaagctggagatcaaac

SEQ ID NO: 3993 - protein, 107 aa, Artificial Sequence
  Description of Artificial Sequence: Synthetic polypeptide
DIQMTQSPSSLSASVGDRVTITCQASQDIRNYLNWYQQKPGKAPKLLIFDASNLETGVPRRFSGSGSGTDFTFTISTLQPEDIATYYCQQYGNLQYTFGQGTKLEIK

SEQ ID NO: 3994 - protein, 9 aa, Artificial Sequence
  Description of Artificial Sequence: Synthetic peptide
QQYGNLQYT

SEQ ID NO: 3995 - DNA, 358 bp, Artificial Sequence
  Description of Artificial Sequence: Synthetic polynucleotide
gaggtgcagctggtggagtctgggggaggcttggtacacccgggggggtccctgagactctcctgttcagcctctggattcaccttcagcagctatcccatgaactgggtccgccaggcgccagggaaggggctggagtgggttgcatacattagtgatagtagtagctccatttactacgcagattctctgaggggccgattcaccgtctccagagacaatgccaagaactcattgtatctgcaaatggacagcctgagagacgaggacacggctgtctatttctgtgcgcgagaggaggaccattactcgtacttctaccactggggccagggcaccctggtcaccgtctcctcag

SEQ ID NO: 3996 - protein, 119 aa, Artificial Sequence
  Description of Artificial Sequence: Synthetic polypeptide
EVQLVESGGGLVHPGGSLRLSCSASGFTFSSYPMNWVRQAPGKGLEWVAYISDSSSSIYYADSLRGRFTVSRDNAKNSLYLQMDSLRDEDTAVYFCAREEDHYSYFYHWGQGTLVTVSS

SEQ ID NO: 3997 - protein, 12 aa, Artificial Sequence
  Description of Artificial Sequence: Synthetic peptide
AREEDHYSYFYH

SEQ ID NO: 3998 - DNA, 325 bp, Artificial Sequence
  Description of Artificial Sequence: Synthetic polynucleotide
gacatccagatgacccagtctccttccaccctgtctgcatctgtaggagacagagtcacgatcacttgccgggccagtcagagtataagatcctggttggcctggtatcagcaaaaacctgggaaagcccctaagctcctgatctataaggcgtctactgtacaaagtggggtcccatcaaggttcagcggcagtggatctgggacagaattcactctcaccatcagcagcctgcagcctgatgattttgcaacttattactgccaacagtataatactttttcagaactcactttcggcggagggaccaaggtggagatcaaac

SEQ ID NO: 3999 - protein, 108 aa, Artificial Sequence
  Description of Artificial Sequence: Synthetic polypeptide
DIQMTQSPSTLSASVGDRVTITCRASQSIRSWLAWYQQKPGKAPKLLIYKASTVQSGVPSRFSGSGSGTEFTLTISSLQPDDFATYYCQQYNTFSELTFGGGTKVEIK

SEQ ID NO: 4000 - protein, 10 aa, Artificial Sequence
  Description of Artificial Sequence: Synthetic peptide
QQYNTFSELT

SEQ ID NO: 4001 - DNA, 352 bp, Artificial Sequence
  Description of Artificial Sequence: Synthetic polynucleotide
caggtgcagctggtgcagtctggggctgaggtgaagaaggctgggtcctcggtgaaggtctcctgcaaggcttcaggaggcagcttcagcaatcatgctatgaactgggtgcgacaggcccctggacaagggcttgagtgggtgggagggatcatccctctgtttggaacaccacactacgcacagaaattccagggcagagtcacggttaccgcggacagatccacgagtacaggctatatggagttgaagagactgacatatgaagacacggccgtgtattattgtgcgagagatggggggttcggggacaactactggggccagggatccctggtcaccgtctcctcag

SEQ ID NO: 4002 - protein, 117 aa, Artificial Sequence
  Description of Artificial Sequence: Synthetic polypeptide
QVQLVQSGAEVKKAGSSVKVSCKASGGSFSNHAMNWVRQAPGQGLEWVGGIIPLFGTPHYAQKFQGRVTVTADRSTSTGYMELKRLTYEDTAVYYCARDGGFGDNYWGQGSLVTVSS

SEQ ID NO: 4003 - protein, 10 aa, Artificial Sequence
  Description of Artificial Sequence: Synthetic peptide
ARDGGFGDNY

SEQ ID NO: 4004 - DNA, 322 bp, Artificial Sequence
  Description of Artificial Sequence: Synthetic polynucleotide
gacatccagatgacccagtctccttccaccctgtctgcatctgtaggagacagagtcaccatcacttgccgggccagtgagagtagtaatagctggttggcctggtttcagcagaaaccagggaaagcccctaaactcctgatctataaggcgtctaatttagagaatggggtcccatcaaggttcagcggcagtgggtctgggacagaattcactctcaccatcagcagcctgcagcctgatgattttgcaacttattactgccaactgtataatagctatgtccgggcgttcggccaagggaccaaggtggaagtcaaac

SEQ ID NO: 4005 - protein, 107 aa, Artificial Sequence
  Description of Artificial Sequence: Synthetic polypeptide
DIQMTQSPSTLSASVGDRVTITCRASESSNSWLAWFQQKPGKAPKLLIYKASNLENGVPSRFSGSGSGTEFTLTISSLQPDDFATYYCQLYNSYVRAFGQGTKVEVK

SEQ ID NO: 4006 - protein, 9 aa, Artificial Sequence
  Description of Artificial Sequence: Synthetic peptide
QLYNSYVRA

SEQ ID NO: 4007 - DNA, 359 bp, Artificial Sequence
  Description of Artificial Sequence: Synthetic polynucleotide
caggtgcagctggtgcagtctggggctgaggtgaagaggcctgggtcctcggtgaaggtctcctgcaaagtttctggaggcaacttcaacaactttgctctcagctgggtgcgacaggcccctggacaagggcttgagtggatgggagagatcatccctgtttttggtacaccaaactccgcacagaagttccagggcagagtcacgattaccgcggacaaatccacgagcacagcctacctggaactgagaagcctgagatatgaggacacggccgtgtattactgtgcgagagataggggtggttcgggcccagggtttgactactggggccagggaaccctggtcaccgtctcctc

SEQ ID NO: 4008 - protein, 119 aa, Artificial Sequence
  Description of Artificial Sequence: Synthetic polypeptide
QVQLVQSGAEVKRPGSSVKVSCKVSGGNFNNFALSWVRQAPGQGLEWMGEIIPVFGTPNSAQKFQGRVTITADKSTSTAYLELRSLRYEDTAVYYCARDRGGSGPGFDYWGQGTLVTVS

SEQ ID NO: 4009 - protein, 13 aa, Artificial Sequence
  Description of Artificial Sequence: Synthetic peptide
ARDRGGSGPGFDY

SEQ ID NO: 4010 - DNA, 337 bp, Artificial Sequence
  Description of Artificial Sequence: Synthetic polynucleotide
  modified_base (25)..(25): a, c, t, g, unknown or other
gatattgtgatgactcagtctccantctccctgcccgtcacccctggagagccggcctccatctcctgcaggtctagtcagagcctcctgcatagtaatggatacaactatttggattggtacctgcagaagccagggcagtccccacagctcctgatctatttggggtctaatcgggcctccggggtccctgacaggttcagtggcagtggatcaggcacagattttacactgaaaatcagcagagtggaggctgaggatgttggggtttattactgcatgcaagctctacaaactcctcggacttttggccaggggaccaagctggagatcaaac

SEQ ID NO: 4011 - protein, 112 aa, Artificial Sequence
  Description of Artificial Sequence: Synthetic polypeptide
  MOD_RES (9)..(9): Any amino acid
DIVMTQSPXSLPVTPGEPASISCRSSQSLLHSNGYNYLDWYLQKPGQSPQLLIYLGSNRASGVPDRFSGSGSGTDFTLKISRVEAEDVGVYYCMQALQTPRTFGQGTKLEIK

SEQ ID NO: 4012 - protein, 9 aa, Artificial Sequence
  Description of Artificial Sequence: Synthetic peptide
MQALQTPRT

SEQ ID NO: 4013 - DNA, 361 bp, Artificial Sequence
  Description of Artificial Sequence: Synthetic polynucleotide
caggtgcagctggtgcagtctggggctgaggtgaagaagcctgggtcctcggtgaaggtctcctgcaaggcttctggaggcgccttcaacacgtttgcagtcaactgggtgcgacagacccctggacaagggcttgagtggatgggaggaatcatccctgtctttggaacaccacactacgcacagaagttccagggcagagtcacgattaccgcggacaaatccacgagcacagcctacatggaactgcgcagcctgagatctggagacacggccatttattactgtgcgagaggggggggaggttcggggagcctttttgagtactggggccagggaaccctggtcaccgtctcctcag

SEQ ID NO: 4014 - protein, 120 aa, Artificial Sequence
  Description of Artificial Sequence: Synthetic polypeptide
QVQLVQSGAEVKKPGSSVKVSCKASGGAFNTFAVNWVRQTPGQGLEWMGGIIPVFGTPHYAQKFQGRVTITADKSTSTAYMELRSLRSGDTAIYYCARGGGGSGSLFEYWGQGTLVTVSS

SEQ ID NO: 4015 - protein, 13 aa, Artificial Sequence
  Description of Artificial Sequence: Synthetic peptide
ARGGGGSGSLFEY

SEQ ID NO: 4016 - DNA, 340 bp, Artificial Sequence
  Description of Artificial Sequence: Synthetic polynucleotide
gatattgtgatgactcagtctccactctccctgcccgtcacccctggagagccggcctccatctcctgcaggtcgagtcagagcctcctccatagaaatggatacaactatttggattggtacctgcagaagccagggcagtctccacagctcctgatctatttgggttctcatcgggcctccggggtccctgacaggttcagtggcagtggatcaggcacagattttacactgaaaatcagcagagtggaggctgaggatgttggggtttattactgcatgcaagctctgcaaactcctccgatcaccttcggccaagggacacgactggagattaaac

SEQ ID NO: 4017 - protein, 113 aa, Artificial Sequence
  Description of Artificial Sequence: Synthetic polypeptide
DIVMTQSPLSLPVTPGEPASISCRSSQSLLHRNGYNYLDWYLQKPGQSPQLLIYLGSHRASGVPDRFSGSGSGTDFTLKISRVEAEDVGVYYCMQALQTPPITFGQGTRLEIK

SEQ ID NO: 4018 - protein, 10 aa, Artificial Sequence
  Description of Artificial Sequence: Synthetic peptide
MQALQTPPIT

SEQ ID NO: 4019 - DNA, 364 bp, Artificial Sequence
  Description of Artificial Sequence: Synthetic polynucleotide
caggtgcagctgcaggagtcgggcccaggactggtgaagccttcggagaccctgtccctcacctgcactgtctctggtggctccatcagtacttactactggagctggatccggcagccccccgggaagggactggagtggattgggtttatctattactatgggagcgccaactacaatccctccctcaagagtcgagtcaccatatcagtagacacgtccaagaaccagttctccctgaagctgagctctgtgaccgccgcagacacggccgtgtattactgtgcgagactccgacgtgggtctgctgggtcagatacttttgatatctggggccaagggacactggtcaccgtctcttcag

SEQ ID NO: 4020 - protein, 121 aa, Artificial Sequence
  Description of Artificial Sequence: Synthetic polypeptide
QVQLQESGPGLVKPSETLSLTCTVSGGSISTYYWSWIRQPPGKGLEWIGFIYYYGSANYNPSLKSRVTISVDTSKNQFSLKLSSVTAADTAVYYCARLRRGSAGSDTFDIWGQGTLVTVSS

SEQ ID NO: 4021 - protein, 15 aa, Artificial Sequence
  Description of Artificial Sequence: Synthetic peptide
ARLRRGSAGSDTFDI

SEQ ID NO: 4022 - DNA, 319 bp, Artificial Sequence
  Description of Artificial Sequence: Synthetic polynucleotide
gacatccagatgacccagtctccatcctccctgtctgcatctgtaggagacagagtcaccatcacttgccgggcaagtcagagcgttagcagctatttaaattggtttcagcagaaaccagggaaagcccctaagctcctgatctatgctgcatccagtttgcaaagtggggtcccatcaaggttcagtggcagtggatctgggacagatttcactctcaccatcagcagtctgcaacctgaagattttgcaacttactactgtcaacagagtttcagttccttcactttcggccctgggaccatactggatatcaaac

SEQ ID NO: 4023 - protein, 106 aa, Artificial Sequence
  Description of Artificial Sequence: Synthetic polypeptide
DIQMTQSPSSLSASVGDRVTITCRASQSVSSYLNWFQQKPGKAPKLLIYAASSLQSGVPSRFSGSGSGTDFTLTISSLQPEDFATYYCQQSFSSFTFGPGTILDIK

SEQ ID NO: 4024 - protein, 8 aa, Artificial Sequence
  Description of Artificial Sequence: Synthetic peptide
QQSFSSFT

SEQ ID NO: 4025 - DNA, 346 bp, Artificial Sequence
  Description of Artificial Sequence: Synthetic polynucleotide
caggtccagcttgtgcagtctggggctgaggtgaagaagcctggggcctcagtgaaggtttcctgcaagggttctggatacacattcgctgactttgctatacattgggtgcgccaggcccccggacaaagccttgagtggatgggatggatcatcactggcaatggtgacacaaaatattcacggaagttccagggcagagtcaccatcaccagggacagatccgcgagtacagcctacatggagctgagcggcctgagatctgaagacacggctgtgtatttctgtgtgagagggggctggttcgacccctggggccagggaaccctggtcaccgtctcctcag

SEQ ID NO: 4026 - protein, 115 aa, Artificial Sequence
  Description of Artificial Sequence: Synthetic polypeptide
QVQLVQSGAEVKKPGASVKVSCKGSGYTFADFAIHWVRQAPGQSLEWMGWIITGNGDTKYSRKFQGRVTITRDRSASTAYMELSGLRSEDTAVYFCVRGGWFDPWGQGTLVTVSS

SEQ ID NO: 4027 - protein, 8 aa, Artificial Sequence
  Description of Artificial Sequence: Synthetic peptide
VRGGWFDP

SEQ ID NO: 4028 - DNA, 322 bp, Artificial Sequence
  Description of Artificial Sequence: Synthetic polynucleotide
gacatccagatgacccagtctccatcctccctgtctgcatctgtaggagacagagttaccatcaaatgccaggcgagtcaggacataaggaactatttaaattggtatcaccagaaaccagggaaagcccctaaactcctgatctacgatgcatccattttgcaaacaggggtcccatcaaggttcagtggaagtggatctgggacagatttcactttcaccatcagcagcctgcagcctgaagatattggaacgtattactgtcaacagtatgataatttctcgtggacgttcggccaagggaccaaggtggaaatcaaac

SEQ ID NO: 4029 - protein, 107 aa, Artificial Sequence
  Description of Artificial Sequence: Synthetic polypeptide
DIQMTQSPSSLSASVGDRVTIKCQASQDIRNYLNWYHQKPGKAPKLLIYDASILQTGVPSRFSGSGSGTDFTFTISSLQPEDIGTYYCQQYDNFSWTFGQGTKVEIK

SEQ ID NO: 4030 - protein, 9 aa, Artificial Sequence
  Description of Artificial Sequence: Synthetic peptide
QQYDNFSWT

SEQ ID NO: 4031 - DNA, 355 bp, Artificial Sequence
  Description of Artificial Sequence: Synthetic polynucleotide
caggtgcagctggtgcagtctggggctgaggtgaagaagcctgggacctcggtgaaggtctcctgcaaggttactggaggctccttcagtaattttgccatcacttgggtgcgacaggcccctggagaagggcttgagtggatgggagagatcattcctgtttttggtactgcaagatacgcacagaagttgaagggcagagtcacgatttccgcggacgagtccacgagcacaggctacatggagttgagcagactgagacttcaagacacgggcgtgtatttttgcgcgagagtcgacggtttggggagccttgacgactggggccagggaaccctggtcaccgtctcctcag

SEQ ID NO: 4032 - protein, 118 aa, Artificial Sequence
  Description of Artificial Sequence: Synthetic polypeptide
QVQLVQSGAEVKKPGTSVKVSCKVTGGSFSNFAITWVRQAPGEGLEWMGEIIPVFGTARYAQKLKGRVTISADESTSTGYMELSRLRLQDTGVYFCARVDGLGSLDDWGQGTLVTVSS

SEQ ID NO: 4033 - protein, 11 aa, Artificial Sequence
  Description of Artificial Sequence: Synthetic peptide
ARVDGLGSLDD

SEQ ID NO: 4034 - DNA, 337 bp, Artificial Sequence
  Description of Artificial Sequence: Synthetic polynucleotide
gatattgtgatgactcagtctccactctccctgcccgtcacccctggagagccggcctccatctcctgcaggtctagtcagagcctcctgcatagagatggaaacaactatttggattggtacctgcagaggccagggcagtctccacagctcctgatctatttgggttcttatcgggcctccggggtccctgacaggttcagtggcagtggatcaggctcagatttcacactgaaaatcagcagagtggaggctgaggatgttggggtttattactgcatgcaaactctacaaactcctcgcacttttggccaggggaccaagctggagatcaaac

SEQ ID NO: 4035 - protein, 112 aa, Artificial Sequence
  Description of Artificial Sequence: Synthetic polypeptide
DIVMTQSPLSLPVTPGEPASISCRSSQSLLHRDGNNYLDWYLQRPGQSPQLLIYLGSYRASGVPDRFSGSGSGSDFTLKISRVEAEDVGVYYCMQTLQTPRTFGQGTKLEIK

SEQ ID NO: 4036 - protein, 9 aa, Artificial Sequence
  Description of Artificial Sequence: Synthetic peptide
MQTLQTPRT

SEQ ID NO: 4037 - DNA, 364 bp, Artificial Sequence
  Description of Artificial Sequence: Synthetic polynucleotide
caggtgcagctggtggagtctgggggaggcgtggtccagcctgggagttcactgagactctcctgtggagcctctggattcatcttcagtaattatgccatgcactgggtccgccaggctccaggcaaggggctggagtggatggcagtgatatcagatgatggagaaaatatagagtatggagactccgtgaagggccggttcaccatctccagagacaattcgaagaataggttgtatctgcaaatggacagcctgagagatgaggacacggctgtgtattactgtgcgaaagatccccgcagctgggtcgacaactggttcgacccctggggccagggaaccctggtcaccgtctcctcag

SEQ ID NO: 4038 - protein, 121 aa, Artificial Sequence
  Description of Artificial Sequence: Synthetic polypeptide
QVQLVESGGGVVQPGSSLRLSCGASGFIFSNYAMHWVRQAPGKGLEWMAVISDDGENIEYGDSVKGRFTISRDNSKNRLYLQMDSLRDEDTAVYYCAKDPRSWVDNWFDPWGQGTLVTVSS

SEQ ID NO: 4039 - protein, 14 aa, Artificial Sequence
  Description of Artificial Sequence: Synthetic peptide
AKDPRSWVDNWFDP

SEQ ID NO: 4040 - DNA, 322 bp, Artificial Sequence
  Description of Artificial Sequence: Synthetic polynucleotide
gaaatagtgatgacgcagtctccagccaccctgtctgtgtctccgggggaaagagccaccctctcctgcagggccagtcagagtgttaccatcaacttagcctggtaccagcagaaacctggccaggctcccaggctcctcatccatggtgcatccaccagggccactggcatcccagccaggttcagtggcagtgggtctgggacagagttcactctcaccatcagcagcctgcagtctgaagattttgcaatttattattgtcagcagtatgattactggccgctcactttcggcggagggtccaaggtggagatcaaac

SEQ ID NO: 4041 - protein, 107 aa, Artificial Sequence
  Description of Artificial Sequence: Synthetic polypeptide
EIVMTQSPATLSVSPGERATLSCRASQSVTINLAWYQQKPGQAPRLLIHGASTRATGIPARFSGSGSGTEFTLTISSLQSEDFAIYYCQQYDYWPLTFGGGSKVEIK

SEQ ID NO: 4042 - protein, 9 aa, Artificial Sequence
  Description of Artificial Sequence: Synthetic peptide
QQYDYWPLT

SEQ ID NO: 4043 - DNA, 358 bp, Artificial Sequence
  Description of Artificial Sequence: Synthetic polynucleotide
caggtgcagctggtgcagtctggggctgaggtgaagaagcctgggtcctcggtgaaggtctcctgcaaggcttctggaggcaccttcagcacctttgctatcaactgggtgcgacaggcccctggacaagggcttgagtggatgggggggctcatccctgtctttggtactccaaacctcgcacagaaattccagggcagagtcacgatgaccgcagacgaatctacgaccacagcctacatggaactgaacagcctgagatctgaggacacggccttttactactgtgcgagagaggggggtgggagcccctcatttgactactggggccagggaaccctggtcaccgtctcctcag

SEQ ID NO: 4044 - protein, 119 aa, Artificial Sequence
  Description of Artificial Sequence: Synthetic polypeptide
QVQLVQSGAEVKKPGSSVKVSCKASGGTFSTFAINWVRQAPGQGLEWMGGLIPVFGTPNLAQKFQGRVTMTADESTTTAYMELNSLRSEDTAFYYCAREGGGSPSFDYWGQGTLVTVSS

SEQ ID NO: 4045 - protein, 12 aa, Artificial Sequence
  Description of Artificial Sequence: Synthetic peptide
AREGGGSPSFDY

SEQ ID NO: 4046 - DNA, 337 bp, Artificial Sequence
  Description of Artificial Sequence: Synthetic polynucleotide
gatattgtgatgactcagtctccactctccctgcccgtcacccctggagagccggcctccatctcctgcaggtctagccagagcctcctgcatagtagtggctacatctatttggattggtacctgcagaagccagggcagtctccacagctcctgatttatatgggctctaatcgggcctccggggtccctgacaggttcagtggcagtggatcaggcacagattttacactgaaaatcagcagagtggaggctgaggatgttggggtttattactgcatgcaagctgtacaaactcctcggacgttcggccaagggaccaaggtggaaatcaaac

SEQ ID NO: 4047 - protein, 112 aa, Artificial Sequence
  Description of Artificial Sequence: Synthetic polypeptide
DIVMTQSPLSLPVTPGEPASISCRSSQSLLHSSGYIYLDWYLQKPGQSPQLLIYMGSNRASGVPDRFSGSGSGTDFTLKISRVEAEDVGVYYCMQAVQTPRTFGQGTKVEIK

SEQ ID NO: 4048 - protein, 9 aa, Artificial Sequence
  Description of Artificial Sequence: Synthetic peptide
MQAVQTPRT

SEQ ID NO: 4049 - DNA, 358 bp, Artificial Sequence
  Description of Artificial Sequence: Synthetic polynucleotide
caggtgcagctggtgcagtctggggctgaggtgaagaagccggggtcctcggtgaaggtctcctgcaaggcttctggaggcatcttcaacaactatgctatcagctgggtgcgacaggcccctggacaagggcttgagtggatgggagagatcatccctgtctttggtacagcaaactacgcacagaagttccagggcagagtcacaataaccgcggacaaatccacgagcacagcctacatggaggtgagcagcctgaaatctgaggacacggccgtgtattattgtgcgagagacggcggagccagtgcgagctacgactactggggccagggaaccctggtcaccgtctcctcag

SEQ ID NO: 4050 - protein, 119 aa, Artificial Sequence
  Description of Artificial Sequence: Synthetic polypeptide
QVQLVQSGAEVKKPGSSVKVSCKASGGIFNNYAISWVRQAPGQGLEWMGEIIPVFGTANYAQKFQGRVTITADKSTSTAYMEVSSLKSEDTAVYYCARDGGASASYDYWGQGTLVTVSS

SEQ ID NO: 4051 - protein, 12 aa, Artificial Sequence
  Description of Artificial Sequence: Synthetic peptide
ARDGGASASYDY

SEQ ID NO: 4052 - DNA, 337 bp, Artificial Sequence
  Description of Artificial Sequence: Synthetic polynucleotide
  modified_base (134)..(134): a, c, t, g, unknown or other
  modified_base (136)..(136): a, c, t, g, unknown or other
  modified_base (143)..(145): a, c, t, g, unknown or other
  modified_base (150)..(150): a, c, t, g, unknown or other
  modified_base (154)..(154): a, c, t, g, unknown or other
  modified_base (187)..(187): a, c, t, g, unknown or other
  modified_base (189)..(189): a, c, t, g, unknown or other
gatattgtgatgactcagtctccactctccctgcccgtcacccctggagagccggcctccatctcctgcaggtctagtcagaacctcctgcatagttctggatacacctatttgcattggtacctgcagaagcnanggcaccnnncaccngtcnccatgcccgtcacccctggagagccgtcctccntncctggcaggttcagtggcagtggatcaggcacagattttacactgaaaatcagcagagtggaggctgaggatgtcggggtttattactgcatgcaagctctacaaactcctcgaacgttcggccaagggaccaaggtggaaatcaaac

SEQ ID NO: 4053 - protein, 112 aa, Artificial Sequence
  Description of Artificial Sequence: Synthetic polypeptide
  MOD_RES (45)..(46): Any amino acid
  MOD_RES (48)..(49): Any amino acid
  MOD_RES (52)..(52): Any amino acid
  MOD_RES (63)..(63): Any amino acid
DIVMTQSPLSLPVTPGEPASISCRSSQNLLHSSGYTYLHWYLQKXXHXXPVXMPVTPGEPSSXPGRFSGSGSGTDFTLKISRVEAEDVGVYYCMQALQTPRTFGQGTKVEIK

SEQ ID NO: 4054 - protein, 9 aa, Artificial Sequence
  Description of Artificial Sequence: Synthetic peptide
MQALQTPRT

SEQ ID NO: 4055 - DNA, 358 bp, Artificial Sequence
  Description of Artificial Sequence: Synthetic polynucleotide
caggtgcagctggtgcagtctggggctgaggtgaagaagcctgggtcctcggtgaaggtctcctgcaagtcttctggaggcaccttcagcaactttgctatcaattgggtgcgacaggcccctggacaggggcttgagtggatgggagggatcatccctttttttggttcagcaaaatacgcacagaaattcgagggcagagtcaggattaccgcggacgaatccaccagcacagcctacatggagctgaagagcctgagaaatgacgacacagccgtgtattactgtgcgcgagaggggggtgggagcccctcttttgaatactggggccagggaacccgggtcaccgtctcgtcag

SEQ ID NO: 4056 - protein, 119 aa, Artificial Sequence
  Description of Artificial Sequence: Synthetic polypeptide
QVQLVQSGAEVKKPGSSVKVSCKSSGGTFSNFAINWVRQAPGQGLEWMGGIIPFFGSAKYAQKFEGRVRITADESTSTAYMELKSLRNDDTAVYYCAREGGGSPSFEYWGQGTRVTVSS

SEQ ID NO: 4057 - protein, 12 aa, Artificial Sequence
  Description of Artificial Sequence: Synthetic peptide
AREGGGSPSFEY

SEQ ID NO: 4058 - DNA, 337 bp, Artificial Sequence
  Description of Artificial Sequence: Synthetic polynucleotide
gatattgtgatgactcagtctccactctccctgtccgtcacccctggagagccggcctccatctcctgcaggtctagtcagagcctcctgcataggagtggatacatctatttggattggtacttgcagaagccagggcagtctccacagctcctgatctacatgggttctaatcgggcctccggggtccctgacaggttcagtggcagtggatcaggcacagagtttacactgaaaatcagcagagtggaggctgaggatgttggggtttattactgcatgcaagctacacacactcctcggacgttcggccaagggaccaaggtggaaatcaaac

SEQ ID NO: 4059 - protein, 112 aa, Artificial Sequence
  Description of Artificial Sequence: Synthetic polypeptide
DIVMTQSPLSLSVTPGEPASISCRSSQSLLHRSGYIYLDWYLQKPGQSPQLLIYMGSNRASGVPDRFSGSGSGTEFTLKISRVEAEDVGVYYCMQATHTPRTFGQGTKVEIK

SEQ ID NO: 4060 - protein, 9 aa, Artificial Sequence
  Description of Artificial Sequence: Synthetic peptide
MQATHTPRT

SEQ ID NO: 4061 - DNA, 355 bp, Artificial Sequence
  Description of Artificial Sequence: Synthetic polynucleotide
caggtgcagctggtgcagtctggggctgaggtgaagaagcctgggtcctcggtgaaggtctcctgcaaggcttctggaggcagcttcaacaactatcgaatcagttgggtgcgacaggcccctggacaagggcttgagtggatgggagggatcatccctgtctttggaaaaccaaactacgcacagaagtttcaggtccgagtcacgataaccgcggacgaatccacgtccacatcctacatggagctgagcagcctgagatcggacgacacggccgtgtatttttgtgcgagagattcgggatggctccaattggacgactggggccagggaaccctgctcaccgtctcctcag

SEQ ID NO: 4062 - protein, 118 aa, Artificial Sequence
  Description of Artificial Sequence: Synthetic polypeptide
QVQLVQSGAEVKKPGSSVKVSCKASGGSFNNYRISWVRQAPGQGLEWMGGIIPVFGKPNYAQKFQVRVTITADESTSTSYMELSSLRSDDTAVYFCARDSGWLQLDDWGQGTLLTVSS

SEQ ID NO: 4063 - protein, 11 aa, Artificial Sequence
  Description of Artificial Sequence: Synthetic peptide
ARDSGWLQLDD

SEQ ID NO: 4064 - DNA, 337 bp, Artificial Sequence
  Description of Artificial Sequence: Synthetic polynucleotide
  modified_base (25)..(25): a, c, t, g, unknown or other
gatattgtgatgacccagactccantctccctgtccgtcacccctggacagccggcctccatctcctgcaagtctagtcagaccctcctgcatagtgatggaaacacctatttgtattggtacatacagaagccaggccagcctccacagctcctgatctatgcagtttccacccggttctctggagtcccacataggttcagtggcagcgggtcagggacagatttcacactgaaaatcagccgggtggaggctgaggatgttggggtttattactgcatgcaaagtatacaggttccgatcaccttcggccaagggacacgactggagattaaac

SEQ ID NO: 4065 - protein, 112 aa, Artificial Sequence
  Description of Artificial Sequence: Synthetic polypeptide
  MOD_RES (9)..(9): Any amino acid
DIVMTQTPXSLSVTPGQPASISCKSSQTLLHSDGNTYLYWYIQKPGQPPQLLIYAVSTRFSGVPHRFSGSGSGTDFTLKISRVEAEDVGVYYCMQSIQVPITFGQGTRLEIK

SEQ ID NO: 4066 - protein, 9 aa, Artificial Sequence
  Description of Artificial Sequence: Synthetic peptide
MQSIQVPIT

SEQ ID NO: 4067 - DNA, 350 bp, Artificial Sequence
  Description of Artificial Sequence: Synthetic polynucleotide
caggtgcagctggtgcagtctggggctgaggtgaagaagcctgggtcatcggtgagggtctcctgcagggcctctggaggcaccttcagtcactatactatctcctgggtgcgacaggcccctggacaggggcttgagtggatgggaggcctcctcccgatctttggtacaacaaactacgcaaagagattccagggcagactcacgattaccgcggacgaatccacgagcacagcctacatggagctgagaagcctgagatttgatgacacagccgtttattactgtacgagagatacatttcacgtggctgactactggggccagggaaccctggtcaccgtctcctc

SEQ ID NO: 4068 - protein, 116 aa, Artificial Sequence
  Description of Artificial Sequence: Synthetic polypeptide
QVQLVQSGAEVKKPGSSVRVSCRASGGTFSHYTISWVRQAPGQGLEWMGGLLPIFGTTNYAKRFQGRLTITADESTSTAYMELRSLRFDDTAVYYCTRDTFHVADYWGQGTLVTVS

SEQ ID NO: 4069 - protein, 10 aa, Artificial Sequence
  Description of Artificial Sequence: Synthetic peptide
TRDTFHVADY

SEQ ID NO: 4070 - DNA, 337 bp, Artificial Sequence
  Description of Artificial Sequence: Synthetic polynucleotide
gatattgtgatgactcagtctccactctccctgcccgtcacccctggagagccggcctccatctcctgcaggtctaatcagagcctcctgcatggtgatggatacaactatttggattggtacctgcagaagccagggcagtctccacaactcgtgatctatttgggttctaatcgggcctccggggtctccgacaggttcagtggcagtggatcaggcacagattttacactgaaaatcagcagagtggaggctgaggatgttggggtttatttttgcatgcaagctctacaaactccgtggacgttcggccaagggaccaaggtggacatcaaac

SEQ ID NO: 4071 - protein, 112 aa, Artificial Sequence
  Description of Artificial Sequence: Synthetic polypeptide
DIVMTQSPLSLPVTPGEPASISCRSNQSLLHGDGYNYLDWYLQKPGQSPQLVIYLGSNRASGVSDRFSGSGSGTDFTLKISRVEAEDVGVYFCMQALQTPWTFGQGTKVDIK

SEQ ID NO: 4072 - protein, 9 aa, Artificial Sequence
  Description of Artificial Sequence: Synthetic peptide
MQALQTPWT

SEQ ID NO: 4073 - DNA, 355 bp, Artificial Sequence
  Description of Artificial Sequence: Synthetic polynucleotide
caggtgcagctggtgcagtctggggctgaggtgaagaagcctgggtccgcggtgaaggtctcctgcaaggtctctggaggcaccttcagtaattatgctataacttgggtgcgacaggcccctggacaagggcttgagtggatgggacggatcatccctgtctttgctacaccagactacgcacagaagttccggggcagattcacgattaccgcggacaaatccacgagtacagcctacatggaactgagaaacctaagatctgaggacacggccgtatactactgtgcgagagatggggggactgggagccttgactactggggccagggaaccctggtcaccgtctcctcag

SEQ ID NO: 4074 - protein, 118 aa, Artificial Sequence
  Description of Artificial Sequence: Synthetic polypeptide
QVQLVQSGAEVKKPGSAVKVSCKVSGGTFSNYAITWVRQAPGQGLEWMGRIIPVFATPDYAQKFRGRFTITADKSTSTAYMELRNLRSEDTAVYYCARDGGTGSLDYWGQGTLVTVSS

SEQ ID NO: 4075 - protein, 11 aa, Artificial Sequence
  Description of Artificial Sequence: Synthetic peptide
ARDGGTGSLDY

SEQ ID NO: 4076 - DNA, 337 bp, Artificial Sequence
  Description of Artificial Sequence: Synthetic polynucleotide
gatattgtgatgactcagtctccactctccctgcccgtcacccctggcgagccggcctccatctcctgcaagtctagtcagagcctcctgcatagaactggagacaactatttggattggtaccggcagaagccagggcagtctccacagctcctgatctattggggttctaatcgggcctccggggtccctgagaggttcagtggcagtggatcaggcacagattttacactgaaaatcagcagagtggaggctgaggatgttggcatttattactgcatgcaagctctacaaactcctcttactttcggcggagggaccaaattggagatcaaac

SEQ ID NO: 4077 - protein, 112 aa, Artificial Sequence
  Description of Artificial Sequence: Synthetic polypeptide
DIVMTQSPLSLPVTPGEPASISCKSSQSLLHRTGDNYLDWYRQKPGQSPQLLIYWGSNRASGVPERFSGSGSGTDFTLKISRVEAEDVGIYYCMQALQTPLTFGGGTKLEIK

SEQ ID NO: 4078 - protein, 9 aa, Artificial Sequence
  Description of Artificial Sequence: Synthetic peptide
MQALQTPLT

SEQ ID NO: 4079 - DNA, 362 bp, Artificial Sequence
  Description of Artificial Sequence: Synthetic polynucleotide
caggtgcagctggtggagtctgggggaggcgtggtccagcctgggaggtccctgagactctcctgtgtagtctctggattcacattcagcaactatggcatgcactgggtccgccaggccccaggcaaggggctggagtgggtggcagtcatatcagatgatggaagtcaaaaagaatatggagactccgtgaagggccgattcaccatctccagagacaattccaagaacacggtgtatctgcaaatggacagcctgagagctgaggacacggctctatattactgtgggaaagatcccgccaggtggatagacaattggatcgagtcctggggccagggaatcctggtcactgtctcctc

SEQ ID NO: 4080 - protein, 120 aa, Artificial Sequence
  Description of Artificial Sequence: Synthetic polypeptide
QVQLVESGGGVVQPGRSLRLSCVVSGFTFSNYGMHWVRQAPGKGLEWVAVISDDGSQKEYGDSVKGRFTISRDNSKNTVYLQMDSLRAEDTALYYCGKDPARWIDNWIESWGQGILVTVS

SEQ ID NO: 4081 - protein, 14 aa, Artificial Sequence
  Description of Artificial Sequence: Synthetic peptide
GKDPARWIDNWIES

SEQ ID NO: 4082 - DNA, 322 bp, Artificial Sequence
  Description of Artificial Sequence: Synthetic polynucleotide
  modified_base (25)..(25): a, c, t, g, unknown or other
gaaatagtgatgacgcagtctccantctccctgtctttgtctccaggggagagagccaccctctcctgcagggccagtcagagtgttaccaccaacttagcctggtaccagcagaaacctggccaggctcccagtctcctcatctttggtgcatccaccagggccactggcgtcccagccaggttcagtggcagtgggtctgggacagagttcactctcaccatcagcagcctgcagcctgaagattttgcagtttattactgtcagcaatataataactggccgctcactttcggcggagggaccaaggtggagatcaaac

SEQ ID NO: 4083 - protein, 107 aa, Artificial Sequence
  Description of Artificial Sequence: Synthetic polypeptide
  MOD_RES (9)..(9): Any amino acid
EIVMTQSPXSLSLSPGERATLSCRASQSVTTNLAWYQQKPGQAPSLLIFGASTRATGVPARFSGSGSGTEFTLTISSLQPEDFAVYYCQQYNNWPLTFGGGTKVEIK

SEQ ID NO: 4084 - protein, 9 aa, Artificial Sequence
  Description of Artificial Sequence: Synthetic peptide
QQYNNWPLT

SEQ ID NO: 4085 - DNA, 355 bp, Artificial Sequence
  Description of Artificial Sequence: Synthetic polynucleotide
caggtgcagctggtgcagtctggggctgaggtgaagaagcctgggtcctcggtgaaggtctcctgcaaggcttctggaggcaccttcaacaactttcctctcaactgggtgcgacaggcccctggacaagggcttgagtggatgggagggatcatccctatatttggtacagcaaacttcgcacagaagttccagggcagagtcacgattaccgcggacaaatccacgagcacagcctacatggaactgagcagcctgagatctgaggacacggccgtgtattactgtgcgagagtggatggtttggggagttatgactcctggggccagggaaccctggtcaccgtctcctcag

SEQ ID NO: 4086 - protein, 118 aa, Artificial Sequence
  Description of Artificial Sequence: Synthetic polypeptide
QVQLVQSGAEVKKPGSSVKVSCKASGGTFNNFPLNWVRQAPGQGLEWMGGIIPIFGTANFAQKFQGRVTITADKSTSTAYMELSSLRSEDTAVYYCARVDGLGSYDSWGQGTLVTVSS

SEQ ID NO: 4087 - protein, 11 aa, Artificial Sequence
  Description of Artificial Sequence: Synthetic peptide
ARVDGLGSYDS

SEQ ID NO: 4088 - DNA, 337 bp, Artificial Sequence
  Description of Artificial Sequence: Synthetic polynucleotide
gatattgtgatgactcagtctccactctccctgcccgtcacccctggagagccggcctccatctcctgcaggtctagtcagagcctcctgcataggagtggatacaactatttggattggtacctgcagaagccagggcagcctccacagctcctgatctatttgggatctaatcgggcctccggggtccctgacaggttcagtggcagtggatcaggcacagattttacactgaaaatcagcagagtggaggctgaggatgttggggtttattactgcatgcaagctctgcaaactccccacacttttggccaggggaccaagctggagatcaaac

SEQ ID NO: 4089 - protein, 112 aa, Artificial Sequence
  Description of Artificial Sequence: Synthetic polypeptide
DIVMTQSPLSLPVTPGEPASISCRSSQSLLHRSGYNYLDWYLQKPGQPPQLLIYLGSNRASGVPDRFSGSGSGTDFTLKISRVEAEDVGVYYCMQALQTPHTFGQGTKLEIK

SEQ ID NO: 4090 - protein, 9 aa, Artificial Sequence
  Description of Artificial Sequence: Synthetic peptide
MQALQTPHT

SEQ ID NO: 4091 - DNA, 352 bp, Artificial Sequence
  Description of Artificial Sequence: Synthetic polynucleotide
caggtgcagctggtgcagtctggggctgaggtgaagaagcctgggtcctcggtgaaggtctcctgcaaggcttctggaggcagcttcagcaactacgctatgacctgggtgcgacaggcccctggacaagggcttgagtggatgggagtgatcatacctacttttggtacaccaaactacgcacagaagttccagggcagagtcacgattaccgcggacgagtccacgaaaactgcctacatagaactgagcagtctgaggtctgaagacacggccgtatattactgtgtgacaggaggatatagtgcttacgattattggggccagggaaccctggtcaccgtctcctcag

SEQ ID NO: 4092 - protein, 117 aa, Artificial Sequence
  Description of Artificial Sequence: Synthetic polypeptide
QVQLVQSGAEVKKPGSSVKVSCKASGGSFSNYAMTWVRQAPGQGLEWMGVIIPTFGTPNYAQKFQGRVTITADESTKTAYIELSSLRSEDTAVYYCVTGGYSAYDYWGQGTLVTVSS

SEQ ID NO: 4093 - protein, 10 aa, Artificial Sequence
  Description of Artificial Sequence: Synthetic peptide
VTGGYSAYDY

SEQ ID NO: 4094 - DNA, 322 bp, Artificial Sequence
  Description of Artificial Sequence: Synthetic polynucleotide
gacatccagatgacccagtctccatcctccctgtctgcatctgtaggagacagagtcaccatcacttgccaggcgagtcaggacgttaggcactatgtaaattggtttcagcagaaaccagggaaagcccctaagctcctgatctacgatggaaccaatttagatacaggggtcccatcaaggttcagtggaagtggatctgggacacattttactttcaccatcagcagcctgcagcctgaagatattgcaacatattactgtcaacggtatgatagactcccccccactttcggcggtgggaccaaggtggagatcaaac

SEQ ID NO: 4095 - protein, 107 aa, Artificial Sequence
  Description of Artificial Sequence: Synthetic polypeptide
DIQMTQSPSSLSASVGDRVTITCQASQDVRHYVNWFQQKPGKAPKLLIYDGTNLDTGVPSRFSGSGSGTHFTFTISSLQPEDIATYYCQRYDRLPPTFGGGTKVEIK

SEQ ID NO: 4096 - protein, 9 aa, Artificial Sequence
  Description of Artificial Sequence: Synthetic peptide
QRYDRLPPT

SEQ ID NO: 4097 - DNA, 376 bp, Artificial Sequence
  Description of Artificial Sequence: Synthetic polynucleotide
caggtgcagctgcaggagtcgggcccaagactggtgaagccttcacagaccctgtccctcacctgcactgtctctggtggctccatgagcagtggtggatattactggaactggatccgccagcacccagtgaagggcctggaatggattgggttcatctattacagtgcgaacaccttgtacaacccctccctcgagagtcgagttaccatatcagtggacacgtataagaaccaattctccctgcagctgtcctctgtgactgccgcggactcggccgtctatttctgtgcgagatccttatgtcgtagtagcagttgctattacgatgctttcgatatctggggccaagggacattggtcaccgtctcttcag

SEQ ID NO: 4098 - protein, 125 aa, Artificial Sequence
  Description of Artificial Sequence: Synthetic polypeptide
QVQLQESGPRLVKPSQTLSLTCTVSGGSMSSGGYYWNWIRQHPVKGLEWIGFIYYSANTLYNPSLESRVTISVDTYKNQFSLQLSSVTAADSAVYFCARSLCRSSSCYYDAFDIWGQGTLVTVSS

SEQ ID NO: 4099 - protein, 17 aa, Artificial Sequence
  Description of Artificial Sequence: Synthetic peptide
ARSLCRSSSCYYDAFDI

SEQ ID NO: 4100 - DNA, 319 bp, Artificial Sequence
  Description of Artificial Sequence: Synthetic polynucleotide
gaaattgtgttgacacagtctccagccaccctgtctttgtctccaggggaaagagccaccctctcctgcagggccagtcagagtattagcacctacttagcctggtaccaacagagacctggccaggctcccaggctcctcatctatgatgcatccaacagggccactggcatcccagccaggttcagtggcagtgggtctgggacagacttcactctcaccatcagcagcctagagcctgaagattttgcagtttattactgtcagcagcgtagcaacggtttcactttcggccctgggaccaaagtggatttcaaac

SEQ ID NO: 4101 - protein, 106 aa, Artificial Sequence
  Description of Artificial Sequence: Synthetic polypeptide
EIVLTQSPATLSLSPGERATLSCRASQSISTYLAWYQQRPGQAPRLLIYDASNRATGIPARFSGSGSGTDFTLTISSLEPEDFAVYYCQQRSNGFTFGPGTKVDFK

SEQ ID NO: 4102 - protein, 8 aa, Artificial Sequence
  Description of Artificial Sequence: Synthetic peptide
QQRSNGFT

SEQ ID NO: 4103 - DNA, 373 bp, Artificial Sequence
  Description of Artificial Sequence: Synthetic polynucleotide
gaggtgcagctggtggagtctgggggagacttggtccagcctggggggtccctgagactctcctgttcagcctctggattcaccttcagtaactttgcaatgcactgggtccgccaggctccagggaagggactgcaatatgtttcagctatcagtaataacggggatgcaacatactacgcagactccgtgaagggaagattcaccatctccagagacaatttcaagaacacgctgtatcttcaaatgagcagtctgagagctgaggacacggctatgtattactgtgtgaaagtcctctttgacggcaccaattgggatcttgatgcttttgatatctggggccaagggacaatggtcaccgtctcttcag

SEQ ID NO: 4104 - protein, 124 aa, Artificial Sequence
  Description of Artificial Sequence: Synthetic polypeptide
EVQLVESGGDLVQPGGSLRLSCSASGFTFSNFAMHWVRQAPGKGLQYVSAISNNGDATYYADSVKGRFTISRDNFKNTLYLQMSSLRAEDTAMYYCVKVLFDGTNWDLDAFDIWGQGTMVTVSS

SEQ ID NO: 4105 - protein, 17 aa, Artificial Sequence
  Description of Artificial Sequence: Synthetic peptide
VKVLFDGTNWDLDAFDI

SEQ ID NO: 4106 - DNA, 320 bp, Artificial Sequence
  Description of Artificial Sequence: Synthetic polynucleotide
gacatccagttgacccagtctccatccttcctgtctgcatctgtaggagacagagtcaccatcacttgccgggccagtcaaggcattagcagttctttagcctggtatcagcaaaaaccagggaaagcccctaagctcctgatctatgctgcatccactttgcaacgtgcggtcccgtcaaggttcagcggcagtggctctgggacagaatttactctctcaatcagcagcctgcagcctgaagattttgcaacttattactgtcaacaacttaatagtttccctccagctttcggccccgggaccaaagtggagatcaa

SEQ ID NO: 4107 - protein, 106 aa, Artificial Sequence
  Description of Artificial Sequence: Synthetic polypeptide
DIQLTQSPSFLSASVGDRVTITCRASQGISSSLAWYQQKPGKAPKLLIYAASTLQRAVPSRFSGSGSGTEFTLSISSLQPEDFATYYCQQLNSFPPAFGPGTKVEI

SEQ ID NO: 4108 - protein, 9 aa, Artificial Sequence
  Description of Artificial Sequence: Synthetic peptide
QQLNSFPPA

SEQ ID NO: 4109 - DNA, 358 bp, Artificial Sequence
  Description of Artificial Sequence: Synthetic polynucleotide
caggtgcagctggtgcagtctggggctgaggtgaggaagcctgggtcctcggtgagggtctcctgcaggtcttccggaggcaccttcagcacctatgaaatcagctgggtgcgacaggcccctggacagggacttacgtggatgggaggtatcatccctgtctttggttcagcaaactatgctcagaagttccagggcagactcacgattaccgcggacgaatccacgagcacagtctacatggagttgagcagtctgacatctgaggacacggccgtctatttctgtgcgagagacggtgggagcctccccagttttgactactggggccagggaaccctggtcaccgtctcctcag

SEQ ID NO: 4110 - protein, 119 aa, Artificial Sequence
  Description of Artificial Sequence: Synthetic polypeptide
QVQLVQSGAEVRKPGSSVRVSCRSSGGTFSTYEISWVRQAPGQGLTWMGGIIPVFGSANYAQKFQGRLTITADESTSTVYMELSSLTSEDTAVYFCARDGGSLPSFDYWGQGTLVTVSS

SEQ ID NO: 4111 - protein, 12 aa, Artificial Sequence
  Description of Artificial Sequence: Synthetic peptide
ARDGGSLPSFDY

SEQ ID NO: 4112 - DNA, 337 bp, Artificial Sequence
  Description of Artificial Sequence: Synthetic polynucleotide
gatattgtgatgactcagtctccactctccctgttcgtcacccctggagagccggcctccatctcctgcaggtctggtcagagcctcctccatagaaatggatacaatcatttggattggtacctgcagaagccagggcagtctccacagctcctgatctatttgggttctaatcgggcctccggggtccctgacaggttcagtggcagtggatcaggcacagattttacactgaaaatcagcagagtggaggctgaggatgttggggtttatttctgcatgcaatctctacaaactcctcgcaccttcggccaagggacacgactgggaattaaac

SEQ ID NO: 4113 - protein, 112 aa, Artificial Sequence
  Description of Artificial Sequence: Synthetic polypeptide
DIVMTQSPLSLFVTPGEPASISCRSGQSLLHRNGYNHLDWYLQKPGQSPQLLIYLGSNRASGVPDRFSGSGSGTDFTLKISRVEAEDVGVYFCMQSLQTPRTFGQGTRLGIK

SEQ ID NO: 4114 - protein, 9 aa, Artificial Sequence
  Description of Artificial Sequence: Synthetic peptide
MQSLQTPRT

SEQ ID NO: 4115 - DNA, 352 bp, Artificial Sequence
  Description of Artificial Sequence: Synthetic polynucleotide
caggtgcagctggtgcagtctggggctgaggtgaagaggcctgggtcctcggtgaaggtctcctgcaaggcctctggaggcaccttcaggacctctactatcagctgggtccgacaggcccccggacaacggcttgagtggatgggagggattatcccaacctttggaacagcaaactacgcacagaaattccagggcagaatgacgatcagtgcggacgaatccacgagcactgcctacatggagttgagcagcctgaaatctgaggacacggccgtgtattactgcgcgattgggacctacgtacccttggactactggggccagggaaccctggtcaccgtctcctcag

SEQ ID NO: 4116 - protein, 117 aa, Artificial Sequence
  Description of Artificial Sequence: Synthetic polypeptide
QVQLVQSGAEVKRPGSSVKVSCKASGGTFRTSTISWVRQAPGQRLEWMGGIIPTFGTANYAQKFQGRMTISADESTSTAYMELSSLKSEDTAVYYCAIGTYVPLDYWGQGTLVTVSS

SEQ ID NO: 4117 - protein, 10 aa, Artificial Sequence
  Description of Artificial Sequence: Synthetic peptide
AIGTYVPLDY

SEQ ID NO: 4118 - DNA, 325 bp, Artificial Sequence
  Description of Artificial Sequence: Synthetic polynucleotide
gaaattgtgttgacgcagtctccaggcaccctgtctttgtctccaggggaaagagccaccctctcctgcagggccagtcagagtgttaacagcgactacttaacctggtaccagcagaaacctggccaggctcccaggctcctcatctatagtacatccagcagggccactggcatcccagacaggttcagtggcagtgggtctgggacagacttcagtctcaccatcagcagactggagcctgaagattttgcagtgtattactgtcagcagtatgctaactcacctcagacttttggccaggggaccaggctggagatcaaac

SEQ ID NO: 4119 - protein, 108 aa, Artificial Sequence
  Description of Artificial Sequence: Synthetic polypeptide
EIVLTQSPGTLSLSPGERATLSCRASQSVNSDYLTWYQQKPGQAPRLLIYSTSSRATGIPDRFSGSGSGTDFSLTISRLEPEDFAVYYCQQYANSPQTFGQGTRLEIK

SEQ ID NO: 4120 - protein, 9 aa, Artificial Sequence
  Description of Artificial Sequence: Synthetic peptide
QQYANSPQT

SEQ ID NO: 4121 - DNA, 370 bp, Artificial Sequence
  Description of Artificial Sequence: Synthetic polynucleotide
gaggtgcagctgttggagtctgggggaggcttggtacagcctggggggtccctgagactctcctgtgcagcctctggattcacctttaatgattatgccatgatctgggtccgccaggctccagggaaggggctggagtgggtctcagctatcactggcagtggttctagcacatactacgcagactccgtgaagggccgcttcaccatctccagagacaattccaagaacacactgtatctgcaaatgaactacctgagagccgaggacacggccgtgtattactgtgcgaaagattttatagtgggggctagtggagtctactactttgactactggggccagggaaccctggtcatcgtctcctcag

SEQ ID NO: 4122 - protein, 123 aa, Artificial Sequence
  Description of Artificial Sequence: Synthetic polypeptide
EVQLLESGGGLVQPGGSLRLSCAASGFTFNDYAMIWVRQAPGKGLEWVSAITGSGSSTYYADSVKGRFTISRDNSKNTLYLQMNYLRAEDTAVYYCAKDFIVGASGVYYFDYWGQGTLVIVSS

SEQ ID NO: 4123 - protein, 16 aa, Artificial Sequence
  Description of Artificial Sequence: Synthetic peptide
AKDFIVGASGVYYFDY

SEQ ID NO: 4124 - DNA, 325 bp, Artificial Sequence
  Description of Artificial Sequence: Synthetic polynucleotide
gaaatagtgatgacgcagtctccagccaccctgtctgtgtctccaggggaaagggccaccctctcctgcagggccagtcagagtgttaatagcaacttagcctggtaccagcaaaaacctggccaggctcccaggctcctcatctatgatgcatccaccagggccactggtatcccagccaggttcagtggcagtgggtctgggacagagttcactctcaccatcagcagcctgcagtctgacgatcttgcagtttattactgtcagcagtacgatatctggcctcgtcggactttcggccctgggaccaaagtggccatcaaac

SEQ ID NO: 4125 - protein, 108 aa, Artificial Sequence
  Description of Artificial Sequence: Synthetic polypeptide
EIVMTQSPATLSVSPGERATLSCRASQSVNSNLAWYQQKPGQAPRLLIYDASTRATGIPARFSGSGSGTEFTLTISSLQSDDLAVYYCQQYDIWPRRTFGPGTKVAIK

SEQ ID NO: 4126 - protein, 10 aa, Artificial Sequence
  Description of Artificial Sequence: Synthetic peptide
QQYDIWPRRT

SEQ ID NO: 4127 - DNA, 376 bp, Artificial Sequence
  Description of Artificial Sequence: Synthetic polynucleotide
caggtgcagctgcaggagtcgggcccaggactggtgaagccttcacagaccctgtccctcacctgcactgtctctggtggctccatcagtagtggtggttactactggaactggatccgccagcacccggggaaaggcctggagtggattgggttcatctattacatggagaacacctactacaacccgtccctcaagagtcgagtttccatgtcagtagactcgtccaagaaccagttctccctgaagatgagctctgtgactgccgcggacacggccgtgtattactgtgcgagatccttttgtaggagtagcagctgctattatgatgcttttcatatctggggtcaagggacaatggtcaccgtctcttcag

SEQ ID NO: 4128 - protein, 125 aa, Artificial Sequence
  Description of Artificial Sequence: Synthetic polypeptide
QVQLQESGPGLVKPSQTLSLTCTVSGGSISSGGYYWNWIRQHPGKGLEWIGFIYYMENTYYNPSLKSRVSMSVDSSKNQFSLKMSSVTAADTAVYYCARSFCRSSSCYYDAFHIWGQGTMVTVSS

SEQ ID NO: 4129 - protein, 17 aa, Artificial Sequence
  Description of Artificial Sequence: Synthetic peptide
ARSFCRSSSCYYDAFHI

SEQ ID NO: 4130 - DNA, 319 bp, Artificial Sequence
  Description of Artificial Sequence: Synthetic polynucleotide
gaaattgtgttgacacagtctccagccaccctgtctttgtctccaggggaaagagccactctctcctgcagggccagtcagagtattagcacctacttggcctggtaccaacagaggcctggccaggctcccaggctcctcatctatgatgcatccaacagggccactggcatcccagccaggttcagtggcagtgggtctgggacagacttcactctcaccatcagcagcctagagcctgaagattttgcagtttattactgtcagcagcgtagcaacggtttcactttcggccctgggaccaaagtggatatcaaac

SEQ ID NO: 4131 - protein, 106 aa, Artificial Sequence
  Description of Artificial Sequence: Synthetic polypeptide
EIVLTQSPATLSLSPGERATLSCRASQSISTYLAWYQQRPGQAPRLLIYDASNRATGIPARFSGSGSGTDFTLTISSLEPEDFAVYYCQQRSNGFTFGPGTKVDIK

SEQ ID NO: 4132 - protein, 8 aa, Artificial Sequence
  Description of Artificial Sequence: Synthetic peptide
QQRSNGFT

SEQ ID NO: 4133 - DNA, 355 bp, Artificial Sequence
  Description of Artificial Sequence: Synthetic polynucleotide
caggtgcagctggtgcagtctggggctgaggtgaagaagcctgggtcctcggtgaaggtctcctgcaaggtttctggaggcagcttcattcattatgaaatcagctgggtgcgacaggcccctggacatggacttgagtggatgggacggatcatccctggctttggtacagcaacctacgcacagaagttcgaggacagagtcacgattactccggacgaatcagcgagcacagcctatatggagctgaccactctgcgacctgaggacacggccctttacttctgtgcgcgagatgggggttcggggagttttgactactggggccagggaacgcaggtcaccgtctcctcag

SEQ ID NO: 4134 - protein, 118 aa, Artificial Sequence
  Description of Artificial Sequence: Synthetic polypeptide
QVQLVQSGAEVKKPGSSVKVSCKVSGGSFIHYEISWVRQAPGHGLEWMGRIIPGFGTATYAQKFEDRVTITPDESASTAYMELTTLRPEDTALYFCARDGGSGSFDYWGQGTQVTVSS

SEQ ID NO: 4135 - protein, 11 aa, Artificial Sequence
  Description of Artificial Sequence: Synthetic peptide
ARDGGSGSFDY

SEQ ID NO: 4136 - DNA, 337 bp, Artificial Sequence
  Description of Artificial Sequence: Synthetic polynucleotide
gatattgtgatgactcagtctccactctccctgcccgtcacccctggagagccggcctccatctcctgcaggtctagtcagagcctcctgcatagagatggatacaactacttggattggtacctgcagaagccagggcagtctccacaactcctgatctttttgggttctaatcgggcctccggggtccctgacaggttcagtggcagtggatcaggcacagattttacacttagaatcagcagagtggaggctgaggatattggggtttattactgcatgcaggctctacaaactcctcggacttttggccaggggacgaagctggagatcaaac

SEQ ID NO: 4137 - protein, 112 aa, Artificial Sequence
  Description of Artificial Sequence: Synthetic polypeptide
DIVMTQSPLSLPVTPGEPASISCRSSQSLLHRDGYNYLDWYLQKPGQSPQLLIFLGSNRASGVPDRFSGSGSGTDFTLRISRVEAEDIGVYYCMQALQTPRTFGQGTKLEIK

SEQ ID NO: 4138 - protein, 9 aa, Artificial Sequence
  Description of Artificial Sequence: Synthetic peptide
MQALQTPRT

SEQ ID NO: 4139 - DNA, 352 bp, Artificial Sequence
  Description of Artificial Sequence: Synthetic polynucleotide
caggtgcagctggtgcagtctggggctgaggtgaagaagcctgggtcctcggtgaaggtctcctgcaagacttctggaggcaccttcagcaactttgctatcaactgggtgcgacaggcccctggacaagggcttgagtggatgggagggatcatcccttcctttggtacaccaaactacgcacagaacttccagggcagagtcacgattaccgcggacaagtccacgagcacagcctacatggagctgaccagcctgcgatctgacgacacggccgtctatttctgtgcgaggcggggtggctggggatttgactactggggccagggaaccctggtcaccgtctcctcag

SEQ ID NO: 4140 - protein, 117 aa, Artificial Sequence
  Description of Artificial Sequence: Synthetic polypeptide
QVQLVQSGAEVKKPGSSVKVSCKTSGGTFSNFAINWVRQAPGQGLEWMGGIIPSFGTPNYAQNFQGRVTITADKSTSTAYMELTSLRSDDTAVYFCARRGGWGFDYWGQGTLVTVSS

SEQ ID NO: 4141 - protein, 10 aa, Artificial Sequence
  Description of Artificial Sequence: Synthetic peptide
ARRGGWGFDY

SEQ ID NO: 4142 - DNA, 320 bp, Artificial Sequence
  Description of Artificial Sequence: Synthetic polynucleotide
gacatccagatgacccagtctccatcctccctgtctgtatctgtaggagacagagtcaccatcacttgccaggcgagtcaggacattagcaactatttaaattggtatcagcagaaaccagggaaagcccctaaactcctgatttacgatacatccaatttggaaacaggggtcccatcaaggttcagtggaagtggatctgggacagattttactttcaccatcagcagcctgcagcctgaagatattgcgacatattactgtcatcagtatgataatctccgtcacactttcggcggagggaccaaggtggagatcaa

SEQ ID NO: 4143 - protein, 106 aa, Artificial Sequence
  Description of Artificial Sequence: Synthetic polypeptide
DIQMTQSPSSLSVSVGDRVTITCQASQDISNYLNWYQQKPGKAPKLLIYDTSNLETGVPSRFSGSGSGTDFTFTISSLQPEDIATYYCHQYDNLRHTFGGGTKVEI

SEQ ID NO: 4144 - protein, 9 aa, Artificial Sequence
  Description of Artificial Sequence: Synthetic peptide
HQYDNLRHT

SEQ ID NO: 4145 - DNA, 355 bp, Artificial Sequence
  Description of Artificial Sequence: Synthetic polynucleotide
gaggtgcagctggtggagtctgggggaggcctggtcaagccgggggggtccctgagactcacctgtgcagcctctggactcaccttcagtacctacagtctgaactgggtccgccaggctccagggaaggggctggagtggctctcaatcattagtgatactggaagtgacatttactacgcagactcagtgaagggccgattcaccatgtccagagactacgccaagaactccctatatctgcaaatgaacaggctgagagccgaggacacggctgtgtattactgtgcggttaaccgtgactacgccttctttgactattggggtcagggaaccctggtcaccgtctcctcag

SEQ ID NO: 4146 - protein, 118 aa, Artificial Sequence
  Description of Artificial Sequence: Synthetic polypeptide
EVQLVESGGGLVKPGGSLRLTCAASGLTFSTYSLNWVRQAPGKGLEWLSIISDTGSDIYYADSVKGRFTMSRDYAKNSLYLQMNRLRAEDTAVYYCAVNRDYAFFDYWGQGTLVTVSS

SEQ ID NO: 4147 - protein, 11 aa, Artificial Sequence
  Description of Artificial Sequence: Synthetic peptide
AVNRDYAFFDY

SEQ ID NO: 4148 - DNA, 325 bp, Artificial Sequence
  Description of Artificial Sequence: Synthetic polynucleotide
gacatccagatgacccagtctccttccaccctgtctgcatctgtaggagacagagtcaccatcacttgccgggccagtcagagtattagtagctggttggcctggtatcaccagaaaccagggaaagcccctcagctcctgatctataaggcgtctagtttaaaaagtggggtcccatcaaggttcagcggcagtggatctgggacagaattcactctcaccatcagcagcctgcagcctgatgattttgcaacttattactgccaacagtataatacttattctcggatcaccttcggccaggggacacgagtggagattaaac

SEQ ID NO: 4149 - protein, 108 aa, Artificial Sequence
  Description of Artificial Sequence: Synthetic polypeptide
DIQMTQSPSTLSASVGDRVTITCRASQSISSWLAWYHQKPGKAPQLLIYKASSLKSGVPSRFSGSGSGTEFTLTISSLQPDDFATYYCQQYNTYSRITFGQGTRVEIK

SEQ ID NO: 4150 - protein, 10 aa, Artificial Sequence
  Description of Artificial Sequence: Synthetic peptide
QQYNTYSRIT

SEQ ID NO: 4151 - DNA, 346 bp, Artificial Sequence
  Description of Artificial Sequence: Synthetic polynucleotide
caggtccagcttgtgcagtctggggctgaggtgaagaagcctggggcctcagtgaaggtttcctgcaaggcttctggatacaccttcactcactatgctgtccattgggtgcgccaggcccccggacaaaggcctgagtggatgggatggatcaacgctggcaatggaaacacaaaatattcacagaagttccagggcagagtcaccattaccaccgacacatccgcgagcacagcctacatgcaactgagcagcctgagatctgaagacacggctgtctattactgtgtgagagggggatggttcgcgccctggggccagggaaccctggtcaccgtctcctcag

SEQ ID NO: 4152 - protein, 115 aa, Artificial Sequence
  Description of Artificial Sequence: Synthetic polypeptide
QVQLVQSGAEVKKPGASVKVSCKASGYTFTHYAVHWVRQAPGQRPEWMGWINAGNGNTKYSQKFQGRVTITTDTSASTAYMQLSSLRSEDTAVYYCVRGGWFAPWGQGTLVTVSS

SEQ ID NO: 4153 - protein, 8 aa, Artificial Sequence
  Description of Artificial Sequence: Synthetic peptide
VRGGWFAP

SEQ ID NO: 4154 - DNA, 322 bp, Artificial Sequence
  Description of Artificial Sequence: Synthetic polynucleotide
gacatccagatgacccagtctccatcctccctgtctgcttctgtaggagacagagtcaccatcacttgccaggcgagtcaggacattagcaaccgtttaaattggtttcagcagaaaccagggaaagcccctaaactcctgatctacgatgcatccactttggaaacagggaccccatcaaggttcagtggaagtggatctgggacagattttactttcaccatcagcagcctgcagcctgaagatattgcaacatattactgtcaactttatgatactctgtccgcgtggacgttcggccaagggaccaaggtggagatca

SEQ ID NO: 4155 - protein, 107 aa, Artificial Sequence
  Description of Artificial Sequence: Synthetic polypeptide
DIQMTQSPSSLSASVGDRVTITCQASQDISNRLNWFQQKPGKAPKLLIYDASTLETGTPSRFSGSGSGTDFTFTISSLQPEDIATYYCQLYDTLSAWTFGQGTKVEI

SEQ ID NO: 4156 - protein, 10 aa, Artificial Sequence
  Description of Artificial Sequence: Synthetic peptide
QLYDTLSAWT

SEQ ID NO: 4157 - DNA, 346 bp, Artificial Sequence
  Description of Artificial Sequence: Synthetic polynucleotide
caggtgcagctggtggagtctgggggaggcgtggtccagcctgggaggtccctgagactctcctgtgcagcgtccggattcatcttcagtacttttggcatgcactgggtccgccaggctccaggcaagggactggagtgggtggcagttatatcgtttgatggaaatagcaaaaattatggagacgccgtgaagggccgattcaccatctccagagacaattccaagaatacggtatatctgcaaatgaacagcctgagagtcgaggacacggctgtgtattactgtgtgagagctgcctggttcgacccctggggccagggaaccctggtcaccgtcacctcag

SEQ ID NO: 4158 - protein, 115 aa, Artificial Sequence
  Description of Artificial Sequence: Synthetic polypeptide
QVQLVESGGGVVQPGRSLRLSCAASGFIFSTFGMHWVRQAPGKGLEWVAVISFDGNSKNYGDAVKGRFTISRDNSKNTVYLQMNSLRVEDTAVYYCVRAAWFDPWGQGTLVTVTS

SEQ ID NO: 4159 - protein, 8 aa, Artificial Sequence
  Description of Artificial Sequence: Synthetic peptide
VRAAWFDP

SEQ ID NO: 4160 - DNA, 320 bp, Artificial Sequence
  Description of Artificial Sequence: Synthetic polynucleotide
gacatccagatgacccagtctccatcctccctgtctgcatctgtaggagacagagtcaccatgtcttgccgggcgagtcaggacattagcaatcgtttaaattggtatcaccagaaaccagggaaagccccaaaactcctgatcatggatgcatccaatgtggaaacaggggtcccatcgaggttcagtggaagtggatctgggacagattttactttaaccatcagcagcctgcagcctgaggatattgcaacatattactgtcaacaatatgataatctctcgtggacgttcggccaagggaccaaggtggaaatcaa

SEQ ID NO: 4161 - protein, 106 aa, Artificial Sequence
  Description of Artificial Sequence: Synthetic polypeptide
DIQMTQSPSSLSASVGDRVTMSCRASQDISNRLNWYHQKPGKAPKLLIMDASNVETGVPSRFSGSGSGTDFTLTISSLQPEDIATYYCQQYDNLSWTFGQGTKVEI

SEQ ID NO: 4162 - protein, 9 aa, Artificial Sequence
  Description of Artificial Sequence: Synthetic peptide
QQYDNLSWT

SEQ ID NO: 4163 - DNA, 346 bp, Artificial Sequence
  Description of Artificial Sequence: Synthetic polynucleotide
caggtccagcttgtgcagtctggggctgaggtgaagaagcctggggcctcagtgaaggtttcctgcaaggcctctggatacaccttcagaaattatgctatccattgggtgcgccaggcccccggacaaaggcctgagtggatgggatggatcgacgctggcagttataagacaaaatattcacagaagttccagggcagactcaccattaccagggacatatccgcgagcacggcctacatggagctgagcagcctgagatctgaggacacggctatatatttctgtgcgagaggggggtggttcgacccctggggccagggaaccctggtcaccgtctcctcag

SEQ ID NO: 4164 - protein, 115 aa, Artificial Sequence; identical to SEQ ID NO: 69
  Description of Artificial Sequence: Synthetic polypeptide

SEQ ID NO: 4165 - protein, 8 aa, Artificial Sequence
  Description of Artificial Sequence: Synthetic peptide
ARGGWFDP

SEQ ID NO: 4166 - DNA, 325 bp, Artificial Sequence
  Description of Artificial Sequence: Synthetic polynucleotide
gacatccagatgacccagtctccatcctccctgtctgcatctgtaggagacagagtcaccatcacttgccaggcgagtcacgacattagcaaccaattaaattggtttcagcagaaaccagggaaagcccctaagctcctgatcctggatgcatccaatttggaagcaggggtcccatcgaggttcagtggaagtggatctgggacacattttactttcaccatcagcagcctacagcctgaagattttgctacatattactgtcaacactatgatagtctctccacgtggacgttcggccaagggaccacggtggacctcaaac

SEQ ID NO: 4167 - protein, 108 aa, Artificial Sequence
  Description of Artificial Sequence: Synthetic polypeptide
DIQMTQSPSSLSASVGDRVTITCQASHDISNQLNWFQQKPGKAPKLLILDASNLEAGVPSRFSGSGSGTHFTFTISSLQPEDFATYYCQHYDSLSTWTFGQGTTVDLK

SEQ ID NO: 4168 - protein, 10 aa, Artificial Sequence
  Description of Artificial Sequence: Synthetic peptide
QHYDSLSTWT

SEQ ID NO: 4169 - DNA, 355 bp, Artificial Sequence
  Description of Artificial Sequence: Synthetic polynucleotide
caggtgcagctggtgcagtctggggctgaggtgaagaagcctgggtcctcggtgaaggtctcctgtacggcttctggaggcaacttcaacaactatgctatcaactgggtgcgacaggcccctggacaagggcttgagtggatgggaaggatcatccctgtctttggtacaccaaactacgcacagaggctccagggcagagtcacgattaccgcggacaagtccacgaggacagcctttatggacctgagcagcctgacatctgacgacacggccgtatattattgtgcgcgagatgggggtctggggtcccttgattactggggccagggaactctggtcaccgtctcctcag

SEQ ID NO: 4170 - protein, 118 aa, Artificial Sequence
  Description of Artificial Sequence: Synthetic polypeptide
QVQLVQSGAEVKKPGSSVKVSCTASGGNFNNYAINWVRQAPGQGLEWMGRIIPVFGTPNYAQRLQGRVTITADKSTRTAFMDLSSLTSDDTAVYYCARDGGLGSLDYWGQGTLVTVSS

SEQ ID NO: 4171 - protein, 11 aa, Artificial Sequence
  Description of Artificial Sequence: Synthetic peptide
ARDGGLGSLDY

SEQ ID NO: 4172 - DNA, 337 bp, Artificial Sequence
  Description of Artificial Sequence: Synthetic polynucleotide
gatattgtgatgactcagtctccactctccctgcccgtcacccctggagagccggcctccatctcctgcaggtctagtcagagcctcctacacagagatggaaacaactatttggattggtacctgcagaagccagggcagtctccacgcctcctgatctatttgggttctaatcgggcctccggggtccctgacaggttcagtggcagtggatcaggcacagattttacactgaagatcaccagagtggaggctgaggatgttggggtttattactgcatgcaagctctacaatctcccctcgctttcggcggagggaccagggtggagatcaaac

SEQ ID NO: 4173 - protein, 112 aa, Artificial Sequence
  Description of Artificial Sequence: Synthetic polypeptide
DIVMTQSPLSLPVTPGEPASISCRSSQSLLHRDGNNYLDWYLQKPGQSPRLLIYLGSNRASGVPDRFSGSGSGTDFTLKITRVEAEDVGVYYCMQALQSPLAFGGGTRVEIK

SEQ ID NO: 4174 - protein, 9 aa, Artificial Sequence
  Description of Artificial Sequence: Synthetic peptide
MQALQSPLA

SEQ ID NO: 4175 - DNA, 373 bp, Artificial Sequence
  Description of Artificial Sequence: Synthetic polynucleotide
gaggtgcagctgttggagtctgggggaggcttggtacagcctggggggtccctgagactctcctgtgcagcctctggattcacctttggcagctatgccatgagctgggtccgccaggctccagggaaggggctggagtgggtctcaggtattagtggtagtggtggtaggacagactacgcagactccgtgaagggccggttcaccatctccagagacaattccaagaacacgctgtatctgcaaatgaacagcctgagagccgaggacacggccgtatattactgtgcgaaagatctccaattttgggctactatgatagttgatgcttttgatatctggggccaagggacaatggtcaccgtctcttcag

SEQ ID NO: 4176 - protein, 124 aa, Artificial Sequence
  Description of Artificial Sequence: Synthetic polypeptide
EVQLLESGGGLVQPGGSLRLSCAASGFTFGSYAMSWVRQAPGKGLEWVSGISGSGGRTDYADSVKGRFTISRDNSKNTLYLQMNSLRAEDTAVYYCAKDLQFWATMIVDAFDIWGQGTMVTVSS

SEQ ID NO: 4177 - protein, 17 aa, Artificial Sequence
  Description of Artificial Sequence: Synthetic peptide
AKDLQFWATMIVDAFDI

SEQ ID NO: 4178 - DNA, 322 bp, Artificial Sequence
  Description of Artificial Sequence: Synthetic polynucleotide
gacatccagatgacccagtctccagtctccctgtctgcgtctgtaggagacagagtcaccatcacttgccgggcaagtcagagtattaccagctatttaaattggtatcagcagaaacctgggaaagcccctaagctcctgatctatgctgcatccagtttgcaaagtggggtcccatcaaggttcagtggcagtggatctgggacagatttcactctcaccatcagcagtctgcaacctgaagattttgcaacttactactgtcaacagagttccagtgcccagattacctttggccaggggaccaagctggagatcaaac

SEQ ID NO: 4179 - protein, 107 aa, Artificial Sequence
  Description of Artificial Sequence: Synthetic polypeptide
DIQMTQSPVSLSASVGDRVTITCRASQSITSYLNWYQQKPGKAPKLLIYAASSLQSGVPSRFSGSGSGTDFTLTISSLQPEDFATYYCQQSSSAQITFGQGTKLEIK

SEQ ID NO: 4180 - protein, 9 aa, Artificial Sequence
  Description of Artificial Sequence: Synthetic peptide
QQSSSAQIT

SEQ ID NO: 4181 - DNA, 358 bp, Artificial Sequence
  Description of Artificial Sequence: Synthetic polynucleotide
caggttcagctggtgcagtctggagctgaagtgaagaagcctggggcctcagtgaaggtctcctgcaaggcttttggttacacctttagcaactatggtatcagctgggtgcgacaggcccctggacaagggcttgagtggatgggatggatcagcgcttaccatggcatcacaaactctgtccagaagttccagggcagaatcatcatgaccactgacacatccacgagcacagcctacatggaactgaggagcctgagatctgacgacacggccatttattactgtgcaaggacggaagggctactatccggggatgactactggggccagggaaccctggtcaccgtctcctcag

SEQ ID NO: 4182 - protein, 119 aa, Artificial Sequence
  Description of Artificial Sequence: Synthetic polypeptide
QVQLVQSGAEVKKPGASVKVSCKAFGYTFSNYGISWVRQAPGQGLEWMGWISAYHGITNSVQKFQGRIIMTTDTSTSTAYMELRSLRSDDTAIYYCARTEGLLSGDDYWGQGTLVTVSS

SEQ ID NO: 4183 - protein, 12 aa, Artificial Sequence
  Description of Artificial Sequence: Synthetic peptide
ARTEGLLSGDDY

SEQ ID NO: 4184 - DNA, 331 bp, Artificial Sequence
  Description of Artificial Sequence: Synthetic polynucleotide
cagtctgccctgactcagcctcgctcagtgtccgggtctcctggacagtcagtcaccatctcctgcactggaaccagcagtgatgttggtggttataactctgtctcctggtaccaacagcacccaggcaaagcccccaaactcatgatttatgatgtcagtaagcggccctcaggggtccctgatcgcttctctggctccaagtctggcaacacggcctccctgaccatctctgggctccaggctgaggacgaggctgattattattgctgcgcatatgcaggcaggttcacttatgtcttcggaactgggaccgaggtctccgtcctag

SEQ ID NO: 4185 - protein, 110 aa, Artificial Sequence
  Description of Artificial Sequence: Synthetic polypeptide
QSALTQPRSVSGSPGQSVTISCTGTSSDVGGYNSVSWYQQHPGKAPKLMIYDVSKRPSGVPDRFSGSKSGNTASLTISGLQAEDEADYYCCAYAGRFTYVFGTGTEVSVL

SEQ ID NO: 4186 - protein, 10 aa, Artificial Sequence
  Description of Artificial Sequence: Synthetic peptide
CAYAGRFTYV

SEQ ID NO: 4187 - DNA, 361 bp, Artificial Sequence
  Description of Artificial Sequence: Synthetic polynucleotide
caggtgcagctggtggagtctgggggaggcgtggtccagcctgggaggtccctgagactctcctgtgcagcgtctggattcagcttcggtagctatggcatgcactgggtccgccaggctccaggcaaggggctggcgtgggtggcagttatctggtatgatggaagtgataaatactatgcagactccgtgaagggccgattcaccatctccagagacaattccaagaacaccctgtatctgcaaatgaacaacctgagagccgaggacacggctgtgtattactgtgcgaggtcgaagggaaacagctatggtccatttgactactggggcccgggaaccctggtcaccgtctcctcag

SEQ ID NO: 4188 - protein, 120 aa, Artificial Sequence; identical to SEQ ID NO: 73
  Description of Artificial Sequence: Synthetic polypeptide

SEQ ID NO: 4189 - protein, 13 aa, Artificial Sequence
  Description of Artificial Sequence: Synthetic peptide
ARSKGNSYGPFDY

SEQ ID NO: 4190 - DNA, 334 bp, Artificial Sequence
  Description of Artificial Sequence: Synthetic polynucleotide
cagcttgtgctgactcagtcgccctctgcctctgcctccctgggagcctcggtcaagctcacctgcactctgagcagtgggcacagcggatacgtcatcgcatggcatcagcagcacccagggaagggccctcgttacttgatggagcttaacagtgatggcagccacatcaagggggacgggatccctgatcgcttctcaggctccagttctggggctgagcgctacctcaccatctccagcctccagtctgaggatgaggctgactattactgtcagacctggggcactggcattgttcttttcggcggagggaccaagctgaccgtcctag

SEQ ID NO: 4191 - protein, 111 aa, Artificial Sequence
  Description of Artificial Sequence: Synthetic polypeptide
QLVLTQSPSASASLGASVKLTCTLSSGHSGYVIAWHQQHPGKGPRYLMELNSDGSHIKGDGIPDRFSGSSSGAERYLTISSLQSEDEADYYCQTWGTGIVLFGGGTKLTVL

SEQ ID NO: 4192 - protein, 9 aa, Artificial Sequence
  Description of Artificial Sequence: Synthetic peptide
QTWGTGIVL

SEQ ID NO: 4193 - DNA, 361 bp, Artificial Sequence
  Description of Artificial Sequence: Synthetic polynucleotide
caggtgcagctggtggagtctgggggaggcgtggtccagcctgggaggtccctgagactctcctgtgcagcgtctggattcaccttcagtagctatggaatgcactgggtccgccaggctccaggcaagggactggagtgggtggcacttatatggtatgatggaagtgataaatactatacagactccgtgaagggccgattcaccatttccagagacaattccaagaaaacgttgtatctgcaaatgaacagcctgagagccgaggacacggctgtgtattactgtgcgagggggacgggaaacagctatggcccctttgagtactggggccagggaaccctggtctccgtctcctcag

SEQ ID NO: 4194 - protein, 120 aa, Artificial Sequence
  Description of Artificial Sequence: Synthetic polypeptide
QVQLVESGGGVVQPGRSLRLSCAASGFTFSSYGMHWVRQAPGKGLEWVALIWYDGSDKYYTDSVKGRFTISRDNSKKTLYLQMNSLRAEDTAVYYCARGTGNSYGPFEYWGQGTLVSVSS

SEQ ID NO: 4195 - protein, 13 aa, Artificial Sequence
  Description of Artificial Sequence: Synthetic peptide
ARGTGNSYGPFEY

SEQ ID NO: 4196 - DNA, 334 bp, Artificial Sequence
  Description of Artificial Sequence: Synthetic polynucleotide
cagtctgtgctgactcagtcgccctctgcctctgcctccctgggagccccggtcaagctcacctgcactctgagcagtgggcacagcaactacgtcatcgcctggcatcagcagcagccagagaggggccctcgatatttgatgaagcttaacggtgatggcagccacaataagggggacgggatccctgatcgcttctcaggctccagctctggggctgagtacttcctcaccatctccagcctccagtctgaggatgaggctgactattactgtcagacctggggcactggccgtgtggtattcggcggagggaccaagctgaccgtcctag

SEQ ID NO: 4197 - protein, 111 aa, Artificial Sequence
  Description of Artificial Sequence: Synthetic polypeptide
QSVLTQSPSASASLGAPVKLTCTLSSGHSNYVIAWHQQQPERGPRYLMKLNGDGSHNKGDGIPDRFSGSSSGAEYFLTISSLQSEDEADYYCQTWGTGRVVFGGGTKLTVL

SEQ ID NO: 4198 - protein, 9 aa, Artificial Sequence
  Description of Artificial Sequence: Synthetic peptide
QTWGTGRVV

SEQ ID NO: 4199 - DNA, 347 bp, Artificial Sequence
  Description of Artificial Sequence: Synthetic polynucleotide
caggtgcagctggtggagtctgggggaggcgtggtccagcctgggaggtccctgagactgacctgtgcagcctctggattcaccttcagtcactatggcatacactgggtccgccaggctccaggcaaggggctggagtgggtggcatttatatcatatgatggaactggtaaatactatgcagactccgtgaagggccgattcagcatctccagagacaactccgagaacacgctgtatgtgcagatgagcagcctgagacctgaggacacggctgtctattactgtgcgaggggcggattcgggtttgactactggggccaaggaaccctggtcaccgtctcctc

SEQ ID NO: 4200 - protein, 115 aa, Artificial Sequence
  Description of Artificial Sequence: Synthetic polypeptide
QVQLVESGGGVVQPGRSLRLTCAASGFTFSHYGIHWVRQAPGKGLEWVAFISYDGTGKYYADSVKGRFSISRDNSENTLYVQMSSLRPEDTAVYYCARGGFGFDYWGQGTLVTVS

SEQ ID NO: 4201 - protein, 9 aa, Artificial Sequence
  Description of Artificial Sequence: Synthetic peptide
ARGGFGFDY

SEQ ID NO: 4202 - DNA, 331 bp, Artificial Sequence
  Description of Artificial Sequence: Synthetic polynucleotide
cagtctgccctgactcagcctgcctccgtgtctgggtctcctggacagtcgatcaccatctcctgcactggaaccagcagtgacattggtgcttataactctgtctcctggtaccaacaacacccaggcaaagcccccaaactcctgatttatgaggtcagtgatcggccctcaggggtttctgatcgcttctctggctccaaatctggcaacacggcctccctgaccatctctggactccaggctgacgacgaggctgagtacttctgcagctcatatacaaccagcagcacttatgtcttcgcgcctgggaccaaggtcaccgtcctag

SEQ ID NO: 4203 - protein, 110 aa, Artificial Sequence
  Description of Artificial Sequence: Synthetic polypeptide
QSALTQPASVSGSPGQSITISCTGTSSDIGAYNSVSWYQQHPGKAPKLLIYEVSDRPSGVSDRFSGSKSGNTASLTISGLQADDEAEYFCSSYTTSSTYVFAPGTKVTVL

SEQ ID NO: 4204 - protein, 10 aa, Artificial Sequence
  Description of Artificial Sequence: Synthetic peptide
SSYTTSSTYV

SEQ ID NO: 4205 - DNA, 361 bp, Artificial Sequence
  Description of Artificial Sequence: Synthetic polynucleotide
caggtgcagctggtggagtctgggggaggcgtggtccagcctgggaggtccctgagactctcctgtgcagcctctggattcagtttcagtagctatggcatgcactgggtccgccaggctccaggcaaggggctggagtgggtggcaattatatcatatgatggaagtaataaatactatgtagactccgtgaagggccgattcaccatctccagagacaattccaagaacacgctgtttcttcacatgagcagcctgagaattgacgactcggctgtgtattactgtgcgaaaaagggggggaatagcggtggctggtctgactactggggccagggaaccctggtcaccgtctcctcag

SEQ ID NO: 4206 - protein, 120 aa, Artificial Sequence
  Description of Artificial Sequence: Synthetic polypeptide
QVQLVESGGGVVQPGRSLRLSCAASGFSFSSYGMHWVRQAPGKGLEWVAIISYDGSNKYYVDSVKGRFTISRDNSKNTLFLHMSSLRIDDSAVYYCAKKGGNSGGWSDYWGQGTLVTVSS

SEQ ID NO: 4207 - protein, 13 aa, Artificial Sequence
  Description of Artificial Sequence: Synthetic peptide
AKKGGNSGGWSDY

SEQ ID NO: 4208 - DNA, 334 bp, Artificial Sequence
  Description of Artificial Sequence: Synthetic polynucleotide
cagcctgtgctgactcagtcctcctctgcctctgcttccctgggatcctcggtcaagctcacctgcactctggacagtggacaccgtaggtacatcatcgcatggcatcagctgcagccagggaaggcccctcggttcttgatgaaacttgaggacagtggaagctacaacaaggggagcggagttcctgatcgcttctcaggctccagctctggggctgaccgctacctcaccatctccaacctccagtctgaggatgaggctgattattactgtgagacctgggacagtaacactcaggtgttcggcggagggacgaagctgaccgtcctag

SEQ ID NO: 4209 - protein, 111 aa, Artificial Sequence
  Description of Artificial Sequence: Synthetic polypeptide
QPVLTQSSSASASLGSSVKLTCTLDSGHRRYIIAWHQLQPGKAPRFLMKLEDSGSYNKGSGVPDRFSGSSSGADRYLTISNLQSEDEADYYCETWDSNTQVFGGGTKLTVL

SEQ ID NO: 4210 - protein, 9 aa, Artificial Sequence
  Description of Artificial Sequence: Synthetic peptide
ETWDSNTQV

SEQ ID NO: 4211 - DNA, 361 bp, Artificial Sequence
  Description of Artificial Sequence: Synthetic polynucleotide
caggtgcagctggtggagtctgggggcggcttggtccagcctgggaggtcgctgagactctcctgtgcagcgtctggattcagtttcagtagctatggcatgcactgggtccgccaggctcctggcaaggggctggggtgggtggcaactatatggtatgatggaagtgaaagagactttgcagactccgtgaagggccgattcaccatctcccgagacaattccaagaacacggtgtctctgcaaatgaacagtctgagagtcgaggacacgggtgtgtattattgtgcgaggtccggaggcaacagctatggtccctttgactgctggggccagggaaccctggtcaccgtctcctcag

SEQ ID NO: 4212 - protein, 120 aa, Artificial Sequence
  Description of Artificial Sequence: Synthetic polypeptide
QVQLVESGGGLVQPGRSLRLSCAASGFSFSSYGMHWVRQAPGKGLGWVATIWYDGSERDFADSVKGRFTISRDNSKNTVSLQMNSLRVEDTGVYYCARSGGNSYGPFDCWGQGTLVTVSS

SEQ ID NO: 4213 - protein, 13 aa, Artificial Sequence
  Description of Artificial Sequence: Synthetic peptide
ARSGGNSYGPFDC

SEQ ID NO: 4214 - DNA, 330 bp, Artificial Sequence
  Description of Artificial Sequence: Synthetic polynucleotide
cagtctgtgctgactcagttgccctctgcctctgcctccctgggagcctcggtcaagctcacctgcactctgagcagtgggcacagcggctatgtcatcgcatggcatcaacaacacccagagaagggcccccgatatttgatgaaacttaacagtgatggcagccacaccaagggggacgggatccctgatcgcttctcaggctccagctctggggttgagcgctacctcaccatctccagcctccagtctgaggatgagggtgactattactgtcagacctggggcagtggcatggtgttcggcggagggacgaggctgaccgtccta

SEQ ID NO: 4215 - protein, 110 aa, Artificial Sequence
  Description of Artificial Sequence: Synthetic polypeptide
QSVLTQLPSASASLGASVKLTCTLSSGHSGYVIAWHQQHPEKGPRYLMKLNSDGSHTKGDGIPDRFSGSSSGVERYLTISSLQSEDEGDYYCQTWGSGMVFGGGTRLTVL

SEQ ID NO: 4216 - protein, 8 aa, Artificial Sequence
  Description of Artificial Sequence: Synthetic peptide
QTWGSGMV

SEQ ID NO: 4217 - DNA, 349 bp, Artificial Sequence
  Description of Artificial Sequence: Synthetic polynucleotide
caggtgcagctggtggagtctgggggaggcgtggtccagcctgggaggtccctgagactctcctgtgaagtctctggattcaccttcagtcactatggcatgcactgggtccgccaggctccaggcaaggggctggaatgggtggcatttatatcatatgatggaagtaagaaagactatgcagagtccgtgaagggccgattcaccatctccagagacaattccaagaacacactgtatctgcaaacgaacagcgtgagagctgaggacacggctgtgtattactgtgtgaaagatctaggctggtacggcgactggggccagagaaccctggtcaccgtctcctcag

SEQ ID NO: 4218 - protein, 116 aa, Artificial Sequence
  Description of Artificial Sequence: Synthetic polypeptide
QVQLVESGGGVVQPGRSLRLSCEVSGFTFSHYGMHWVRQAPGKGLEWVAFISYDGSKKDYAESVKGRFTISRDNSKNTLYLQTNSVRAEDTAVYYCVKDLGWYGDWGQRTLVTVSS

SEQ ID NO: 4219 - protein, 9 aa, Artificial Sequence
  Description of Artificial Sequence: Synthetic peptide
VKDLGWYGD

SEQ ID NO: 4220 - DNA, 331 bp, Artificial Sequence
  Description of Artificial Sequence: Synthetic polynucleotide
cagtctgtgctgactcagcctgcctccgtgtctgggtctcctggacagtcgatcaccatctcctgcactggaaccagcagtgacgttggtggttataactatgtctcctggttccaacagcacccaggcaaagcccccaaactcatgatttttgaggtcactaaccggccctcaggggtttctaatcgcttctctggctccaagtctggcaacacggcctccctgatcatctctgggctccaggctgaggacgaggctgattattactgcctctcatatacaagcagcaccacttgggtgttcggcggagggaccaagctgaccgtcctag

SEQ ID NO: 4221 - protein, 110 aa, Artificial Sequence
  Description of Artificial Sequence: Synthetic polypeptide
QSVLTQPASVSGSPGQSITISCTGTSSDVGGYNYVSWFQQHPGKAPKLMIFEVTNRPSGVSNRFSGSKSGNTASLIISGLQAEDEADYYCLSYTSSTTWVFGGGTKLTVL

SEQ ID NO: 4222 - protein, 10 aa, Artificial Sequence
  Description of Artificial Sequence: Synthetic peptide
LSYTSSTTWV

SEQ ID NO: 4223 - DNA, 361 bp, Artificial Sequence
  Description of Artificial Sequence: Synthetic polynucleotide
caggtgcagctggtggagtctgggggaggcgtggtccagccggggaggtccctgagactctcctgtgcagcctctggattcaccttcagtagttatggcatgcactgggtccgccaggctccaggcaaggggctggagtgggtggcagttatattatatgatggaagtactaaattctatgcggactctgtgaagggccgattcaccatctccagagacaattccaagaacacactatatctgcaaatgaacagcctgagaggtgaggacacggctgtctactactgtgcgaaatccttgggctcgcttatggggtcctttgactactggggccagggaaccctggtcaccgtctcctcag

SEQ ID NO: 4224 - protein, 120 aa, Artificial Sequence
  Description of Artificial Sequence: Synthetic polypeptide
QVQLVESGGGVVQPGRSLRLSCAASGFTFSSYGMHWVRQAPGKGLEWVAVILYDGSTKFYADSVKGRFTISRDNSKNTLYLQMNSLRGEDTAVYYCAKSLGSLMGSFDYWGQGTLVTVSS

SEQ ID NO: 4225 - protein, 13 aa, Artificial Sequence
  Description of Artificial Sequence: Synthetic peptide
AKSLGSLMGSFDY

SEQ ID NO: 4226 - DNA, 333 bp, Artificial Sequence
  Description of Artificial Sequence: Synthetic polynucleotide
cagcctgtgctgactcagtcatcctctgcctctgcatccctgggatcctcggtcaggctcacctgcactctggacagtggacacgaaaggtacatcgtcgcatggcatcagcagcagccagggaaggcccctcggtacttgatgaagcttgaaggtggtgaaagctacaacaaggggaacggtgttcctgatcgcttctcaggctccagctctggggctgaccgctacctcaccatctccaacctccagcctgaggatgaggctgattattactgtgagacctgggacagtaacactaaagtgttcggcggagggaccaagctgaccgtccta

SEQ ID NO: 4227 - protein, 111 aa, Artificial Sequence
  Description of Artificial Sequence: Synthetic polypeptide
QPVLTQSSSASASLGSSVRLTCTLDSGHERYIVAWHQQQPGKAPRYLMKLEGGESYNKGNGVPDRFSGSSSGADRYLTISNLQPEDEADYYCETWDSNTKVFGGGTKLTVL

SEQ ID NO: 4228 - protein, 9 aa, Artificial Sequence
  Description of Artificial Sequence: Synthetic peptide
ETWDSNTKV

SEQ ID NO: 4229 - DNA, 358 bp, Artificial Sequence
  Description of Artificial Sequence: Synthetic polynucleotide
caggtgcagctggtgcagtctggggctgaggtgaagaagcctgggtcctcggtgaaggtctcctgtcaggcttctgcaggcaccttcagcaactatggtttcagctgggtgcgacaggcccctggacagggacttgagtggatgggagggatcatccctctctttggtacaccaaactacgcacagaagttccagggcagagtcaccattaccgcggacaagtccacccacacagccttcatggagttgagcagcctgagatctgacgacacggccgtgtattattgtgcgagagatgggggagcagtggctggtcccgtctactggggccagggaaccctcgtcaccgtctcctcag

SEQ ID NO: 4230 - protein, 119 aa, Artificial Sequence
  Description of Artificial Sequence: Synthetic polypeptide
QVQLVQSGAEVKKPGSSVKVSCQASAGTFSNYGFSWVRQAPGQGLEWMGGIIPLFGTPNYAQKFQGRVTITADKSTHTAFMELSSLRSDDTAVYYCARDGGAVAGPVYWGQGTLVTVSS

SEQ ID NO: 4231 - protein, 12 aa, Artificial Sequence
  Description of Artificial Sequence: Synthetic peptide
ARDGGAVAGPVY

SEQ ID NO: 4232 - DNA, 327 bp, Artificial Sequence
  Description of Artificial Sequence: Synthetic polynucleotide
cagtctgtgctgactcagccgccctcagcatctggggcccccgggcagagggtcaccatctcctgcactgggagcagctccaacatcggggcgggttattatgtatcctggtaccagcagttcccaggaacagcccccaaactcctcatctatgaaaatgataagcgaccctcaggggtttctgaccgattctctggctccaagtctggtacctcagcctccctgaccatcactggactccaatctgaggatgaggccgattattactgctcagcatgggatagcagcctgagtactcgcttattcggaggagggacccggctgacc

SEQ ID NO: 4233 - protein, 109 aa, Artificial Sequence
  Description of Artificial Sequence: Synthetic polypeptide
QSVLTQPPSASGAPGQRVTISCTGSSSNIGAGYYVSWYQQFPGTAPKLLIYENDKRPSGVSDRFSGSKSGTSASLTITGLQSEDEADYYCSAWDSSLSTRLFGGGTRLT

SEQ ID NO: 4234 - protein, 11 aa, Artificial Sequence
  Description of Artificial Sequence: Synthetic peptide
SAWDSSLSTRL

SEQ ID NO: 4235 - DNA, 352 bp, Artificial Sequence
  Description of Artificial Sequence: Synthetic polynucleotide
caggtgcagctgcaggagtcgggcccaggactggtgaagccttcacagaccctgtccctcacctgcactgtctctggtggctccgtcagcagtggtggttactactggagctggatccgccagcacccagggaagggcctggagtggattgggttcatctattacactgggaggacctactacaacccgtccctcaagagtcgacttaccatatctgtagacacgtctaagaatcagttctccctgaagctgagctctgtaactgccgcggacacggccgtatattattgtgcgagagatctggggtactttgactcctggggccagggagccctggtcaccgtctcctcag

SEQ ID NO: 4236 - protein, 117 aa, Artificial Sequence
  Description of Artificial Sequence: Synthetic polypeptide
QVQLQESGPGLVKPSQTLSLTCTVSGGSVSSGGYYWSWIRQHPGKGLEWIGFIYYTGRTYYNPSLKSRLTISVDTSKNQFSLKLSSVTAADTAVYYCARDLGYFDSWGQGALVTVSS

SEQ ID NO: 4237 - protein, 9 aa, Artificial Sequence
  Description of Artificial Sequence: Synthetic peptide
ARDLGYFDS

SEQ ID NO: 4238 - DNA, 329 bp, Artificial Sequence
  Description of Artificial Sequence: Synthetic polynucleotide
cagtctgccctgactcagcctgcctccgtgtctgggtctcctggacagtcgatcaccatctcctgcactggaaccagcagtgacctttataattataactatgtctcctggtaccaaaagcacccaggcaaagcccccaaactcttgatttatgaggtcagtaatcggccctcaggggtttctaatcgcttctctggctccaagtctggcaacacggcctccctgaccatctctggactccaggctgaggacgaggctgattattactgcagctcatatataagtggcagcactcgggtgttcggcggagggaccaagctgaccgtcct

SEQ ID NO: 4239 - protein, 109 aa, Artificial Sequence
  Description of Artificial Sequence: Synthetic polypeptide
QSALTQPASVSGSPGQSITISCTGTSSDLYNYNYVSWYQKHPGKAPKLLIYEVSNRPSGVSNRFSGSKSGNTASLTISGLQAEDEADYYCSSYISGSTRVFGGGTKLTV

SEQ ID NO: 4240 - protein, 10 aa, Artificial Sequence
  Description of Artificial Sequence: Synthetic peptide
SSYISGSTRV

SEQ ID NO: 4241 - DNA, 364 bp, Artificial Sequence
  Description of Artificial Sequence: Synthetic polynucleotide
caggtgcagctggtgcagtctggggctgaggttaagaagcctggggcctcagtgaaggtctcctgcaaggcttctggatacaccttcaccggctactatatccactgggtgcgacaggcccctggacaagggcttgagtggatgggatggatcaaccctaacagtggtggcacaatttatgcacagaagtttcaggactgggtcaccatgaccagggacacgtccatcagcacagcctacatggagctgagcaggctgagatctgacgacacggccgtgtattactgtgcgaggcagtccttcggttcgggcctgactgcttttgatatctggggccaaggcacagtggtcaccgtctcttcag

SEQ ID NO: 4242 - protein, 121 aa, Artificial Sequence
  Description of Artificial Sequence: Synthetic polypeptide
QVQLVQSGAEVKKPGASVKVSCKASGYTFTGYYIHWVRQAPGQGLEWMGWINPNSGGTIYAQKFQDWVTMTRDTSISTAYMELSRLRSDDTAVYYCARQSFGSGLTAFDIWGQGTVVTVSS

SEQ ID NO: 4243 - protein, 14 aa, Artificial Sequence
  Description of Artificial Sequence: Synthetic peptide
ARQSFGSGLTAFDI

SEQ ID NO: 4244 - DNA, 331 bp, Artificial Sequence
  Description of Artificial Sequence: Synthetic polynucleotide
cagtctgtgttgactcagccgccctcagtgtctgcggccccaggacagaaggtcaccatctcctgctctggaagcagctccaacattgggaataattatgtatcctggtaccagcagctcccaggaacagcccccaaactcctcatctatgaaaataataaccgaccctcagggattcctgaccgattctctggctccaagtctggcacgtcagccaccctgggcatcaccggactccagactggggacgaggccgattactactgcggaacatgggataggagcctgagtgttgtggtattcggcggagggaccaagctgaccgtcctag

SEQ ID NO: 4245 - protein, 110 aa, Artificial Sequence
  Description of Artificial Sequence: Synthetic polypeptide
QSVLTQPPSVSAAPGQKVTISCSGSSSNIGNNYVSWYQQLPGTAPKLLIYENNNRPSGIPDRFSGSKSGTSATLGITGLQTGDEADYYCGTWDRSLSVVVFGGGTKLTVL

SEQ ID NO: 4246 - protein, 11 aa, Artificial Sequence
  Description of Artificial Sequence: Synthetic peptide
GTWDRSLSVVV

SEQ ID NO: 4247 - DNA, 352 bp, Artificial Sequence
  Description of Artificial Sequence: Synthetic polynucleotide
caggtgcagctgcaggagtcgggcccaggactggtgaagccttcacagaccctgtccctcacctgcactgtctctggtggctccatcagcagtggtggttactactggagctggatccgccagcacccagggaagggcctggagtggattgggttcatctattacagtgggaacacctactacaacccgtccctcaagagtcgagttaccatatcagtggacacgtctaagaaccagttctccctgaaactgaactctgtgactgccgcggacacggccgtgtattactgtgcgagagactacggcccctttgactcctggggccagggaaccctggtcaccgtctcctcag

SEQ ID NO: 4248 - protein, 117 aa, Artificial Sequence
  Description of Artificial Sequence: Synthetic polypeptide
QVQLQESGPGLVKPSQTLSLTCTVSGGSISSGGYYWSWIRQHPGKGLEWIGFIYYSGNTYYNPSLKSRVTISVDTSKNQFSLKLNSVTAADTAVYYCARDYGPFDSWGQGTLVTVSS

SEQ ID NO: 4249 - protein, 9 aa, Artificial Sequence
  Description of Artificial Sequence: Synthetic peptide
ARDYGPFDS

SEQ ID NO: 4250 - DNA, 330 bp, Artificial Sequence
  Description of Artificial Sequence: Synthetic polynucleotide
cagtctgccctgactcagcctgcctccgtgtctgggtctcctggacagtcgatcaccatctcctgcactggaaccagcagtgacgttgttagttataactatgtctcctggtatcaacagtacccaggcaaagcccccaaactcatgatttatgaggtcagtaatcggccctcaggggtttccaatcgcttctctggctccaagtctggcaacaaggcctccctgaccatctctgggctccaggctgaggacgaggctgattattattgcagctcatatataagcggcagaactcgggtcttcggaactgggaccaaggtcaccgtccta

SEQ ID NO: 4251 - protein, 110 aa, Artificial Sequence
  Description of Artificial Sequence: Synthetic polypeptide
QSALTQPASVSGSPGQSITISCTGTSSDVVSYNYVSWYQQYPGKAPKLMIYEVSNRPSGVSNRFSGSKSGNKASLTISGLQAEDEADYYCSSYISGRTRVFGTGTKVTVL

SEQ ID NO: 4252 - protein, 10 aa, Artificial Sequence
  Description of Artificial Sequence: Synthetic peptide
SSYISGRTRV

SEQ ID NO: 4253 - DNA, 352 bp, Artificial Sequence
  Description of Artificial Sequence: Synthetic polynucleotide
caggtgcagctgcaggagtcgggcccaggactggtgaagacttcacagaccctgtccctcacctgcactgtctctggtggctccgtcagcagtggtggatactactggagctggatccgccagcacccagggaagggcctggagtggattgggttcatctattacaatgggagaacctactacaatccgtccctcaagagtcgacttaccatatcagtagacacgtctaagaaccaattctccctgaacctgaactctgtgactgccgcggacacggccgtttattactgtgcgagagatctagggcacttcgatctctggggccgtggcaccctggtcactgtctcctcag

SEQ ID NO: 4254 - protein, 117 aa, Artificial Sequence
  Description of Artificial Sequence: Synthetic polypeptide
QVQLQESGPGLVKTSQTLSLTCTVSGGSVSSGGYYWSWIRQHPGKGLEWIGFIYYNGRTYYNPSLKSRLTISVDTSKNQFSLNLNSVTAADTAVYYCARDLGHFDLWGRGTLVTVSS

SEQ ID NO: 4255 - protein, 9 aa, Artificial Sequence
  Description of Artificial Sequence: Synthetic peptide
ARDLGHFDL

SEQ ID NO: 4256 - DNA, 331 bp, Artificial Sequence
  Description of Artificial Sequence: Synthetic polynucleotide
cagtctgccctgactcagcctgcctccgtgtctgggtctcctggacagtcgatcaccatctcctgcactggatccagcagtgacgttgctttttataactatgtctcctggtaccaacagcacccaggcaaagcccccaaactcataatgtatgacgtcaattatcggccctcaggggtttctaatcgcttctctggctccaagtctggcagcacggcctccctgaccatctctgggctccaggctgaggacgaggctgattattattgcagctcatatacaagcggcgccactagggttttcggcggagggaccaaggtgaccgtcctag

SEQ ID NO: 4257 - protein, 110 aa, Artificial Sequence
  Description of Artificial Sequence: Synthetic polypeptide
QSALTQPASVSGSPGQSITISCTGSSSDVAFYNYVSWYQQHPGKAPKLIMYDVNYRPSGVSNRFSGSKSGSTASLTISGLQAEDEADYYCSSYTSGATRVFGGGTKVTVL

SEQ ID NO: 4258 - protein, 10 aa, Artificial Sequence
  Description of Artificial Sequence: Synthetic peptide
SSYTSGATRV

SEQ ID NO: 4259 - DNA, 352 bp, Artificial Sequence
  Description of Artificial Sequence: Synthetic polynucleotide
caggtgcagctggtggagtctgggggaggcgtggtccagcctgggaggtccctgagactctcctgtgcagcctctggattcaccttcagtaactatggcatacactgggtccgccaggctccaggccaggggctggagtgggtggcatttatatcatatgatggcactggtaaatactatgcagactccgtgaagggccgattcactatctccagagacaattccaagaacacggtgtatttgcaaatgaacagcctgagagttgaggacacggctgtgtattactgtgcgaaaggcccctatggtccttttgacgactggggccagggaaacctggtcaccgtctcctcag

SEQ ID NO: 4260 - protein, 117 aa, Artificial Sequence
  Description of Artificial Sequence: Synthetic polypeptide
QVQLVESGGGVVQPGRSLRLSCAASGFTFSNYGIHWVRQAPGQGLEWVAFISYDGTGKYYADSVKGRFTISRDNSKNTVYLQMNSLRVEDTAVYYCAKGPYGPFDDWGQGNLVTVSS

SEQ ID NO: 4261 - protein, 10 aa, Artificial Sequence
  Description of Artificial Sequence: Synthetic peptide
AKGPYGPFDD

SEQ ID NO: 4262 - DNA, 331 bp, Artificial Sequence
  Description of Artificial Sequence: Synthetic polynucleotide
cagtctgccctgactcagcctgcctccgtgtctgggtctcctggacagtcgatcaccatctcctgcactggaaccagcagtgacgttggtggttataactatgtctcctggtaccaacaacacccaggcaaagcccccaaactcatgatttatgaggtcagtaatcggccctcaggggtttctaatcgcttctccggctccaagtctggcaacacggcctccctgaccatctctgggctccaggctgaggacgaggctgattattactgcaactcatatacaagcaccagcacttggctgttcggcggagggaccaggctgaccgtcctag

SEQ ID NO: 4263 - protein, 110 aa, Artificial Sequence
  Description of Artificial Sequence: Synthetic polypeptide
QSALTQPASVSGSPGQSITISCTGTSSDVGGYNYVSWYQQHPGKAPKLMIYEVSNRPSGVSNRFSGSKSGNTASLTISGLQAEDEADYYCNSYTSTSTWLFGGGTRLTVL

SEQ ID NO: 4264 - protein, 10 aa, Artificial Sequence
  Description of Artificial Sequence: Synthetic peptide
NSYTSTSTWL

SEQ ID NO: 4265 - DNA, 361 bp, Artificial Sequence
  Description of Artificial Sequence: Synthetic polynucleotide
caggtgcagctggtggagtctgggggaggcgtggtccagcctgggaggtccctgagactctcctgtgcagcgtctggattcaccttcagtagttatgccatgcactgggtccgccaggctccagggaaggggctggagtgggtggcacttatatggtatgatggaagtgatgaaaattatgcagactccgtgaagggccgatccgccatctccagagacaattccaagaacatgctgtatctgcaaatggacagcctgagaaccgaggacacggctgtgtattattgtgtgaggtctgcagggaacagtaatggcctctttgacttgtggggccagggaagcctggtcaccgtttcctcag

SEQ ID NO: 4266 - protein, 120 aa, Artificial Sequence
  Description of Artificial Sequence: Synthetic polypeptide
QVQLVESGGGVVQPGRSLRLSCAASGFTFSSYAMHWVRQAPGKGLEWVALIWYDGSDENYADSVKGRSAISRDNSKNMLYLQMDSLRTEDTAVYYCVRSAGNSNGLFDLWGQGSLVTVSS

SEQ ID NO: 4267 - protein, 13 aa, Artificial Sequence
  Description of Artificial Sequence: Synthetic peptide
VRSAGNSNGLFDL

SEQ ID NO: 4268 - DNA, 334 bp, Artificial Sequence
  Description of Artificial Sequence: Synthetic polynucleotide
cagtctgtgctgactcagtcgccctctgcctctgcctccctgggagccgcggtcaagctcacctgcactctgagcagtgggcacagcagatacgccatcgcatggcatcagcagcagccagagaagggccctcgatatttgatgagcattgacagtgatggcagccacaggaagggggacgggatccctgatcgcttctcaggctccagctctggggcggagcgctacctcatcatctccagcctccagcctgaggatgaggctgactattactgtcagacttggggcactggcattcaggtgttcggcggagggaccaagttgaccgtcctag

SEQ ID NO: 4269 - protein, 111 aa, Artificial Sequence
  Description of Artificial Sequence: Synthetic polypeptide
QSVLTQSPSASASLGAAVKLTCTLSSGHSRYAIAWHQQQPEKGPRYLMSIDSDGSHRKGDGIPDRFSGSSSGAERYLIISSLQPEDEADYYCQTWGTGIQVFGGGTKLTVL

SEQ ID NO: 4270 - protein, 9 aa, Artificial Sequence
  Description of Artificial Sequence: Synthetic peptide
QTWGTGIQV

SEQ ID NO: 4271 - DNA, 367 bp, Artificial Sequence
  Description of Artificial Sequence: Synthetic polynucleotide
caggtgcagctggtgcagtctggggctgaggtgaagaagcctggggcgtcagtgaaggtttcgtgcaaggcttctggatacaccttcaacaactactatatgcactgggtgcgacaggcccctggacaggggcctgagtggatgggaatattcaaccctagtggtggaaccacaaggtacgcacagaagttccagggtagagtcaccctgactagagacacgtccacgagcacagtctacatggaactgagcagcctgagatctgaggacacggccgtgtattactgtgcgaggcctcacctggagtacggtgactccccttactttgaccactggggccagggaaccctggtcaccgtctcctcag

SEQ ID NO: 4272 - protein, 122 aa, Artificial Sequence
  Description of Artificial Sequence: Synthetic polypeptide
QVQLVQSGAEVKKPGASVKVSCKASGYTFNNYYMHWVRQAPGQGPEWMGIFNPSGGTTRYAQKFQGRVTLTRDTSTSTVYMELSSLRSEDTAVYYCARPHLEYGDSPYFDHWGQGTLVTVSS

SEQ ID NO: 4273 - protein, 15 aa, Artificial Sequence
  Description of Artificial Sequence: Synthetic peptide
ARPHLEYGDSPYFDH

SEQ ID NO: 4274 - DNA, 331 bp, Artificial Sequence
  Description of Artificial Sequence: Synthetic polynucleotide
cagtctgtgctgactcagccaccctcagcgtctgggacccccgggcagagggtcaccatctcttgttctggaagcaactccaacatcggaagtgaatatgtatactggtaccagcaactcccaggatcggcccccaaactcctcatctttaagaataatcagcggccctcaggggtccctgaccgattctctggctccaagtctggcacctcagcctccctggccatcagtgggctccggtccgaggatgaggctgattattactgtgcagcatgggatgacaatttgcgtggtccggtattcggcggagggaccaagctgaccgtcctag

SEQ ID NO: 4275 - protein, 110 aa, Artificial Sequence
  Description of Artificial Sequence: Synthetic polypeptide
QSVLTQPPSASGTPGQRVTISCSGSNSNIGSEYVYWYQQLPGSAPKLLIFKNNQRPSGVPDRFSGSKSGTSASLAISGLRSEDEADYYCAAWDDNLRGPVFGGGTKLTVL

SEQ ID NO: 4276 - protein, 11 aa, Artificial Sequence
  Description of Artificial Sequence: Synthetic peptide
AAWDDNLRGPV

SEQ ID NO: 4277 - DNA, 361 bp, Artificial Sequence
  Description of Artificial Sequence: Synthetic polynucleotide
caggtgcagctggtggagtctgggggaggcgtggtccagcctgggaggtccctgagactctcctgtgcagcctctggattaagtttcagtagctatggcatgcactgggtccgccaggctccaggcaaggggctggagtgggtggcagttatatcatatgatggaagtaacaagttctatgcagactccgtgaagggccgattcaccatctccagagacaattccaagaacacgctgtctctgcaaatgaacagcctgagacctgaggacacggctgtgtattactgtgcgaatggcgcgggtaatctaatgggagttactgtctactggggccagggaaccctggtctccgtctcctcag

SEQ ID NO: 4278 - protein, 120 aa, Artificial Sequence
  Description of Artificial Sequence: Synthetic polypeptide
QVQLVESGGGVVQPGRSLRLSCAASGLSFSSYGMHWVRQAPGKGLEWVAVISYDGSNKFYADSVKGRFTISRDNSKNTLSLQMNSLRPEDTAVYYCANGAGNLMGVTVYWGQGTLVSVSS

SEQ ID NO: 4279 - protein, 13 aa, Artificial Sequence
  Description of Artificial Sequence: Synthetic peptide
ANGAGNLMGVTVY

SEQ ID NO: 4280 - DNA, 322 bp, Artificial Sequence
  Description of Artificial Sequence: Synthetic polynucleotide
cagtctgtgttgacgcagccgccctcagtgtctgcggccccaggacagaaggtcaccatctcctgctctggaagcacctccagcattgggaataattatgtatcctggtaccggcggtcccccaaactcttcatttttgacaatactgaacgaccctcagggattcctgaccgattctctgactccaagtctggcacgtcagccaccctgggcatcgccggactccggtctggggacgaggccgattatgactgcggaacatgggatagaagcctaagtggtgggggggtgttcggcggagggaccaaactgaccgtcctag

SEQ ID NO: 4281 - protein, 107 aa, Artificial Sequence
  Description of Artificial Sequence: Synthetic polypeptide
QSVLTQPPSVSAAPGQKVTISCSGSTSSIGNNYVSWYRRSPKLFIFDNTERPSGIPDRFSDSKSGTSATLGIAGLRSGDEADYDCGTWDRSLSGGGVFGGGTKLTVL

SEQ ID NO: 4282 - protein, 12 aa, Artificial Sequence
  Description of Artificial Sequence: Synthetic peptide
GTWDRSLSGGGV

SEQ ID NO: 4283 - DNA, 358 bp, Artificial Sequence
  Description of Artificial Sequence: Synthetic polynucleotide
caggtgcagctggtggagtctgggggaggcgtggtccagcctgggaggtccctgagactctcctgtgcagcgtctggattcaccttcagtcactatggcatccactgggtccgccaggctccaggcaaggggctggagtgggtgacagttatttggtatgatggaagttataaaaactatggagactccgtgaagggccgattcaccatctccagagacaattccaagaacactctgtatctgcaaatgaacagcctgagagccgaggacacggctgtgtattactgtgtgagagaaggccccgaagggggtggctgggactactggggccagggaaccctggtcaccgtctcctcag

SEQ ID NO: 4284 - protein, 119 aa, Artificial Sequence
  Description of Artificial Sequence: Synthetic polypeptide
QVQLVESGGGVVQPGRSLRLSCAASGFTFSHYGIHWVRQAPGKGLEWVTVIWYDGSYKNYGDSVKGRFTISRDNSKNTLYLQMNSLRAEDTAVYYCVREGPEGGGWDYWGQGTLVTVSS

SEQ ID NO: 4285 - protein, 12 aa, Artificial Sequence
  Description of Artificial Sequence: Synthetic peptide
VREGPEGGGWDY

SEQ ID NO: 4286 - DNA, 331 bp, Artificial Sequence
  Description of Artificial Sequence: Synthetic polynucleotide
cagtctgtgctgactcagcctgcctccgtgtctgggtctcctggacagtcgatcaccatctcctgcactggaaccagcagtgacgttggtgcttataactatgtctcctggtaccaacaacacccaggcaaagcccccaaactcatgatttatgaggtcagtaatcggccctcaggtgtttctcatcgcttctctggctccaagtctggcaacacggcctccctgaccatctctgggctccaggctgaggacgaggctgattattactgcagctcatatacaaccagcggcacttatgtcttcggaactgggaccaaggtcaccgtcctag

SEQ ID NO: 4287 - protein, 110 aa, Artificial Sequence
  Description of Artificial Sequence: Synthetic polypeptide
QSVLTQPASVSGSPGQSITISCTGTSSDVGAYNYVSWYQQHPGKAPKLMIYEVSNRPSGVSHRFSGSKSGNTASLTISGLQAEDEADYYCSSYTTSGTYVFGTGTKVTVL

SEQ ID NO: 4288 - protein, 10 aa, Artificial Sequence
  Description of Artificial Sequence: Synthetic peptide
SSYTTSGTYV

SEQ ID NO: 4289 - DNA, 345 bp, Artificial Sequence
  Description of Artificial Sequence: Synthetic polynucleotide
caggtgcagctggtggagtctgggggaggcttggtcaagcctggagggtccctgagactctcctgtgcagcctctggattcaccttcagtgactactacatgaactggatccgccaggctccagggaaggggctggagtggctttcatacattagtagtagtagtagttacacacactacgcagactctgtgaagggccgattcaccatctccagagacaacaccaagaactcactgtatctgcaaatgaacggcctgagagccgaggacacggccgtgtattactgtgcgagagattggagcagtgacgtctggggccaagggaccacggtcattgtctcctca

SEQ ID NO: 4290 - protein, 115 aa, Artificial Sequence
  Description of Artificial Sequence: Synthetic polypeptide
QVQLVESGGGLVKPGGSLRLSCAASGFTFSDYYMNWIRQAPGKGLEWLSYISSSSSYTHYADSVKGRFTISRDNTKNSLYLQMNGLRAEDTAVYYCARDWSSDVWGQGTTVIVSS

SEQ ID NO: 4291 - protein, 8 aa, Artificial Sequence
  Description of Artificial Sequence: Synthetic peptide
ARDWSSDV

SEQ ID NO: 4292 - DNA, 349 bp, Artificial Sequence
  Description of Artificial Sequence: Synthetic polynucleotide
cagtctgtgctgactcagccaccttcctcctccgcatctcctggagaatccgccagactcacctgcaccttgcccagtgacatcaatgttggtagctacaacatatactggtaccagcagaagccagggagccctcccaggtatctcctgtactactactcagactcagataagggccagggctctggagtccccagccgcttctctggatccaaagatgcttcagccaatacagggattttactcatctccgggctccagtctgaggatgaggctgactatttctgtatgatttggccaagcaatgcttcttatgtcttcggaactgggaccaaggtcaccgtcctag

SEQ ID NO: 4293 - protein, 116 aa, Artificial Sequence
  Description of Artificial Sequence: Synthetic polypeptide
QSVLTQPPSSSASPGESARLTCTLPSDINVGSYNIYWYQQKPGSPPRYLLYYYSDSDKGQGSGVPSRFSGSKDASANTGILLISGLQSEDEADYFCMIWPSNASYVFGTGTKVTVL

SEQ ID NO: 4294 - protein, 10 aa, Artificial Sequence
  Description of Artificial Sequence: Synthetic peptide
MIWPSNASYV

SEQ ID NO: 4295 - DNA, 363 bp, Artificial Sequence
  Description of Artificial Sequence: Synthetic polynucleotide
caggtgcagctggtggagtctgggggaggcgtggtccagcctgggaggtccctgagactctcctgtgcagcgtctggattcaccttcagtatctatggcatgcactgggtccgccaggctccaggcaaggggctggagtgggtggcagttatttggtatgatggaagtaataaatactatgcagactccgtgaagggccgattcaccatctccagagacaattccaagaacacgctgtttctgcaaatgaacagcctgagagccgaggacacggctgtgtattactgtgcgaggggatacagccccaactactactacgctatggacgtctggggccaagggaccacggtcaccgtctcctca

SEQ ID NO: 4296 - protein, 121 aa, Artificial Sequence
  Description of Artificial Sequence: Synthetic polypeptide
QVQLVESGGGVVQPGRSLRLSCAASGFTFSIYGMHWVRQAPGKGLEWVAVIWYDGSNKYYADSVKGRFTISRDNSKNTLFLQMNSLRAEDTAVYYCARGYSPNYYYAMDVWGQGTTVTVSS

SEQ ID NO: 4297 - protein, 14 aa, Artificial Sequence
  Description of Artificial Sequence: Synthetic peptide
ARGYSPNYYYAMDV

SEQ ID NO: 4298 - DNA, 334 bp, Artificial Sequence
  Description of Artificial Sequence: Synthetic polynucleotide
cagtctgtgctgactcagccgccctcagtgtctggggccccagggcagagggtcaccatctcctgcactgggagcagctccaacatcggggcaggttatgatgtacagtggtaccagcagcttccaggaacagtccccaaactcctcatctatgctaacagcattcggccctcaggggtccctgaccgattctctggctccaagtctggcacctcagcctccctggccatcactgggctccaggctgaggatgaggctgattattactgccagtcctatgacagcagcctgagtggttatgtcttcggaactgagaccaaggtcaccgtcctag

SEQ ID NO: 4299 - protein, 111 aa, Artificial Sequence
  Description of Artificial Sequence: Synthetic polypeptide
QSVLTQPPSVSGAPGQRVTISCTGSSSNIGAGYDVQWYQQLPGTVPKLLIYANSIRPSGVPDRFSGSKSGTSASLAITGLQAEDEADYYCQSYDSSLSGYVFGTETKVTVL

SEQ ID NO: 4300 - protein, 11 aa, Artificial Sequence
  Description of Artificial Sequence: Synthetic peptide
QSYDSSLSGYV

SEQ ID NO: 4301 - DNA, 363 bp, Artificial Sequence
  Description of Artificial Sequence: Synthetic polynucleotide
caggtgcagctggtgcagtctggggctgaggtgaagaagcctggggcctcagtgagggtctcctgcaagacttctggatactccttcaccggctactatatccactgggtgcgacaggcccctggacaagggcttgaatggatgggatggatcaaccctaacagtggtgacacacactatccacagaggtttcagggctgggtctccatgagcagggacacgtccatcagcacagcctacatggagctcagcagcctgagttctgacgacacggccgtgtattactgtgcgacctactttggttcgggtaacaactacgctttggacgtctggggccaggggaccacggtcaccgtctcctca

SEQ ID NO: 4302 - protein, 121 aa, Artificial Sequence
  Description of Artificial Sequence: Synthetic polypeptide
QVQLVQSGAEVKKPGASVRVSCKTSGYSFTGYYIHWVRQAPGQGLEWMGWINPNSGDTHYPQRFQGWVSMSRDTSISTAYMELSSLSSDDTAVYYCATYFGSGNNYALDVWGQGTTVTVSS

SEQ ID NO: 4303 - protein, 14 aa, Artificial Sequence
  Description of Artificial Sequence: Synthetic peptide
ATYFGSGNNYALDV

SEQ ID NO: 4304 - DNA, 331 bp, Artificial Sequence
  Description of Artificial Sequence: Synthetic polynucleotide
cagtctgccctgactcagcctccctccgcgtccgggtctcctggacagtcagtcaccatctcctgcactggaaccagcagtgacgttggtagttttaactctgtctcctggtaccaacaacacccaggcaaagcccccaagctcatcatttatgaggtcactaagcggccctcaggggtccctgttcgcttctctggctccaagtctggcaacacggcctccctgaccgtctctgggctccaggctgaggatgaggctgattattactgcagctcatatgcaggccgcaacaattatgtcttcggacctgggaccacggtcaccgtcctag

SEQ ID NO: 4305 - protein, 110 aa, Artificial Sequence
  Description of Artificial Sequence: Synthetic polypeptide
QSALTQPPSASGSPGQSVTISCTGTSSDVGSFNSVSWYQQHPGKAPKLIIYEVTKRPSGVPVRFSGSKSGNTASLTVSGLQAEDEADYYCSSYAGRNNYVFGPGTTVTVL

SEQ ID NO: 4306 - protein, 10 aa, Artificial Sequence
  Description of Artificial Sequence: Synthetic peptide
SSYAGRNNYV

SEQ ID NO: 4307 - DNA, 361 bp, Artificial Sequence
  Description of Artificial Sequence: Synthetic polynucleotide
caggtgcagctggtggagtctgggggaggcgtggtccagcctgggaggtccctgagactctcctgtgcagcctctggattcaccttcagtagctatggcatgcactgggtccgccaggctccaggccaggggctggagtgggtggcacttatctcttatgatggagacaacaaacactattcagactccgtgaagggccgatacaccatctccagagacaattccaagaacacgctttatctgcaaatgaacagcctgagacctgaggacacggctgtctactactgtgcgaaagtggcaggtaatagcggtggttggcacgacctctggggccagggaaccctggtcaccgtctcctcag

SEQ ID NO: 4308 - protein, 120 aa, Artificial Sequence
  Description of Artificial Sequence: Synthetic polypeptide
QVQLVESGGGVVQPGRSLRLSCAASGFTFSSYGMHWVRQAPGQGLEWVALISYDGDNKHYSDSVKGRYTISRDNSKNTLYLQMNSLRPEDTAVYYCAKVAGNSGGWHDLWGQGTLVTVSS

SEQ ID NO: 4309 - protein, 13 aa, Artificial Sequence
  Description of Artificial Sequence: Synthetic peptide
AKVAGNSGGWHDL

SEQ ID NO: 4310 - DNA, 334 bp, Artificial Sequence
  Description of Artificial Sequence: Synthetic polynucleotide
cagcctgtgctgactcagtcatcctctgcctctgcttccctgggatcctcggtcaaactcacctgcactctggacactggacacagtaggtacatcatcgcatggcatcagcagcagccagggaaggcccctcggtacttgatgaaggttgaacctggtggaagctacaacagggggggcggtgttcctgatcgcttctcaggctccagctctggggctgaccgctacctcaccatctccaacctccagtctgaggatgaggctgactattactgtgaaagttgggacagtaagactcatgtcttcggaactgggaccaaggtcaccgtcctag

SEQ ID NO: 4311 - protein, 111 aa, Artificial Sequence
  Description of Artificial Sequence: Synthetic polypeptide
QPVLTQSSSASASLGSSVKLTCTLDTGHSRYIIAWHQQQPGKAPRYLMKVEPGGSYNRGGGVPDRFSGSSSGADRYLTISNLQSEDEADYYCESWDSKTHVFGTGTKVTVL

SEQ ID NO: 4312 - protein, 9 aa, Artificial Sequence
  Description of Artificial Sequence: Synthetic peptide
ESWDSKTHV

SEQ ID NO: 4313 - DNA, 352 bp, Artificial Sequence
  Description of Artificial Sequence: Synthetic polynucleotide
caggtgcagctggtggagtctgggggaggcgtggtccagcctgggaggtccctgagactctcctgtgaagtctctggattcaccttcagtcactatggcatgcactgggtccgccagggtccaggcaaggggctggagtgggtggcattcatatcatatgatgggagttataaagactatgcaaagtccgtgaagggccgactcaccatctccagagacaattccaagaacatgctgtatctgcaaatgaatagcctaagacctgaagacacggctgtgtatttttgtgcgagaagttatggtggcttgtttgacaattggggccagggaaccctggtcaccgtctcctcag

SEQ ID NO: 4314 - protein, 117 aa, Artificial Sequence
  Description of Artificial Sequence: Synthetic polypeptide
QVQLVESGGGVVQPGRSLRLSCEVSGFTFSHYGMHWVRQGPGKGLEWVAFISYDGSYKDYAKSVKGRLTISRDNSKNMLYLQMNSLRPEDTAVYFCARSYGGLFDNWGQGTLVTVSS

SEQ ID NO: 4315 - protein, 10 aa, Artificial Sequence
  Description of Artificial Sequence: Synthetic peptide
ARSYGGLFDN

SEQ ID NO: 4316 - DNA, 328 bp, Artificial Sequence
  Description of Artificial Sequence: Synthetic polynucleotide
cagtctgccctgactcagcctcgctcagtgtccgggtctcctggacagtcagtcaccatctcctgcactggaaccagcagtgatgttggtggttataactttgtctcctggtaccagcagcacccaggcaaagccccccaactcatgatttatgatgtcaataagcggccctcaggagtccctgatcggttctctggctccaagtctggcaacacggcctccctgaccatctctgggctacaggctgaggatgaggctgattattactgctgctcatatgctggcagcccttatgtcttcggaggtgggactacggtcaccgtcctag

SEQ ID NO: 4317 - protein, 109 aa, Artificial Sequence
  Description of Artificial Sequence: Synthetic polypeptide
QSALTQPRSVSGSPGQSVTISCTGTSSDVGGYNFVSWYQQHPGKAPQLMIYDVNKRPSGVPDRFSGSKSGNTASLTISGLQAEDEADYYCCSYAGSPYVFGGGTTVTVL

SEQ ID NO: 4318 - protein, 9 aa, Artificial Sequence
  Description of Artificial Sequence: Synthetic peptide
CSYAGSPYV

SEQ ID NO: 4319 - DNA, 361 bp, Artificial Sequence
  Description of Artificial Sequence: Synthetic polynucleotide
caggtgcagctggtggagtctgggggaggcgtggtccagcctgggaggtccctgagactctcctgtgcagcctctggattcagcttcagttattatggcatgcactgggtccgccaggctccaggcaaggggctggagtgggtggcagttatatcatatgatggaagtgataaatactatacagactccgtgaagggccgattcaccatctccagagacaattccaagaacacgctgtatttgcaaatgaacagcctgagggctgaagacacggctgtctattattgtgcgaaagtcagtggcaactaccaggggccctttgactcctggggccagggaacccgggtcaccgtctcctcag

SEQ ID NO: 4320 - protein, 120 aa, Artificial Sequence
  Description of Artificial Sequence: Synthetic polypeptide
QVQLVESGGGVVQPGRSLRLSCAASGFSFSYYGMHWVRQAPGKGLEWVAVISYDGSDKYYTDSVKGRFTISRDNSKNTLYLQMNSLRAEDTAVYYCAKVSGNYQGPFDSWGQGTRVTVSS

SEQ ID NO: 4321 - protein, 13 aa, Artificial Sequence
  Description of Artificial Sequence: Synthetic peptide
AKVSGNYQGPFDS

SEQ ID NO: 4322 - DNA, 334 bp, Artificial Sequence
  Description of Artificial Sequence: Synthetic polynucleotide
  modified_base (70)..(70): a, c, t, g, unknown or other
  modified_base (198)..(198): a, c, t, g, unknown or other
cagcctgtgctgactcagtcgtcctctgcctctgcttccctgggatcctcggtcaagctcacctgcactntgagcagcggtcacagtcgccacatcgtcacatggcatcagcagcagccagggaaggcccctcggtttctgatgaaggttgaaagtagtggaagctacaacaaggggagcggagttcttgatcgcttntcaggctccagttctggggctgaccgctacctcaccatctccaacctccagtctgaagatgaggctgattattactgtgagacctgggacactcacactcgcgtgtttggcggagggaccaagctgaccgtcctag

SEQ ID NO: 4323 - protein, 111 aa, Artificial Sequence
  Description of Artificial Sequence: Synthetic polypeptide
  MOD_RES (24)..(24): Any amino acid
  MOD_RES (66)..(66): Any amino acid
QPVLTQSSSASASLGSSVKLTCTXSSGHSRHIVTWHQQQPGKAPRFLMKVESSGSYNKGSGVLDRXSGSSSGADRYLTISNLQSEDEADYYCETWDTHTRVFGGGTKLTVL

SEQ ID NO: 4324 - protein, 9 aa, Artificial Sequence
  Description of Artificial Sequence: Synthetic peptide
ETWDTHTRV

SEQ ID NO: 4325 - DNA, 349 bp, Artificial Sequence
  Description of Artificial Sequence: Synthetic polynucleotide
caggtgcagctggtggagtctgggggaggcgtggtccagcctgggaggtccctgagactctcctgtgcagcgtctggcttcaccttcagtcactatggcatgcactgggtccgccaggctccaggcaaggggctggagtgggtggcagttatatggtatgatggaggtaataaatactatgcggactccctgaagggccgattcaccatctccagagacaattccaagaacactctatatctgcaaatgaacagcctgagagtcgatgacacggctttttattactgtgcgagagacgggttcggctttgactactggggccagggaaccctggtcaccgtctcctcag

SEQ ID NO: 4326 - protein, 116 aa, Artificial Sequence
  Description of Artificial Sequence: Synthetic polypeptide
QVQLVESGGGVVQPGRSLRLSCAASGFTFSHYGMHWVRQAPGKGLEWVAVIWYDGGNKYYADSLKGRFTISRDNSKNTLYLQMNSLRVDDTAFYYCARDGFGFDYWGQGTLVTVSS

SEQ ID NO: 4327 - protein, 9 aa, Artificial Sequence
  Description of Artificial Sequence: Synthetic peptide
ARDGFGFDY

SEQ ID NO: 4328 - DNA, 331 bp, Artificial Sequence
  Description of Artificial Sequence: Synthetic polynucleotide
cagtctgccctgactcagcctcgctcagtgtccgggtctcctggacagtcagtctccatctcctgcactgggtccagcagtgatgttggtggttataattatgtctcctggtaccaacagcacccaggcaaagcccccaacctcttgatttatgatgtcactaaccggccgtcaggggtccctgatcgcttctctggctccaagtctggcaacacggcctccctgaccatctctgggctccaggctgaggatgaggctgattattactgctgctcatatacagccacctacactcgggtgttcggcggagggaccaaactgaccgtcctag

SEQ ID NO: 4329 - protein, 110 aa, Artificial Sequence
  Description of Artificial Sequence: Synthetic polypeptide
QSALTQPRSVSGSPGQSVSISCTGSSSDVGGYNYVSWYQQHPGKAPNLLIYDVTNRPSGVPDRFSGSKSGNTASLTISGLQAEDEADYYCCSYTATYTRVFGGGTKLTVL

SEQ ID NO: 4330 - protein, 10 aa, Artificial Sequence
  Description of Artificial Sequence: Synthetic peptide
CSYTATYTRV

SEQ ID NO: 4331 - DNA, 361 bp, Artificial Sequence
  Description of Artificial Sequence: Synthetic polynucleotide
caggtgcagctggtggagtctgggggaggcgtggtccagcctgggaggtccctgagactctcctgtgcagcgtctggattcattttcagtagctttggcatgcactgggtccgccaggctccaggcaaggggctggagtgggtggcaactatttggtatgatggaagtgacaaatactatgcagactccgtgaagggccgattcaccatctccagagacaatttcaagagaatggtatatctgcaaatgaatagcctgagagccgaggacacggctgtgtattactgtgcgagaggggcgggaaacagctatgggccccttgacaactggggccagggaaccctggtcaccgtctcctcag

SEQ ID NO: 4332 - protein, 120 aa, Artificial Sequence
  Description of Artificial Sequence: Synthetic polypeptide
QVQLVESGGGVVQPGRSLRLSCAASGFIFSSFGMHWVRQAPGKGLEWVATIWYDGSDKYYADSVKGRFTISRDNFKRMVYLQMNSLRAEDTAVYYCARGAGNSYGPLDNWGQGTLVTVSS

SEQ ID NO: 4333 - protein, 13 aa, Artificial Sequence
  Description of Artificial Sequence: Synthetic peptide
ARGAGNSYGPLDN

SEQ ID NO: 4334 - DNA, 334 bp, Artificial Sequence
  Description of Artificial Sequence: Synthetic polynucleotide
cagcttgtgctgactcagtcgccctctgcctctgcctccctgggagcctcggtcaaactcacctgcactctgagcagtgggcacagcggctacgtcatcgcatggcatcagcagcagccagacaagggccctcgatacttgatgaaccttaacagtgatggcagccacagtaagggggacgggatccctgatcgcttctcaggctccagctctggggctgagcgctacctcaccatctccagcctccagtctgaggatgaggctgactattactgtcagacctggggctctggccctgtggttttcggcggagggaccaagctgaccgtcctag

SEQ ID NO: 4335 - protein, 111 aa, Artificial Sequence
  Description of Artificial Sequence: Synthetic polypeptide
QLVLTQSPSASASLGASVKLTCTLSSGHSGYVIAWHQQQPDKGPRYLMNLNSDGSHSKGDGIPDRFSGSSSGAERYLTISSLQSEDEADYYCQTWGSGPVVFGGGTKLTVL

SEQ ID NO: 4336 - protein, 9 aa, Artificial Sequence
  Description of Artificial Sequence: Synthetic peptide
QTWGSGPVV

SEQ ID NO: 4337 - DNA, 352 bp, Artificial Sequence
  Description of Artificial Sequence: Synthetic polynucleotide
caggtgcagctgcaggagtcgggcccaggactggtgaagccttcacagaccctgtccctcacctgcactgtctctggtggctccatcagcagtggtggttactactggagctggatccgccagcacccagggaagggcctggagtggattggattcatctactacactgggagaacctactacaacccgtccctcaagagtcgacttaccatatctatagacacgtctaagaaccagttctccctgaagctgagttctgttactgccgcggacacggccgtgtatttctgtgtgcgagatctagggtacttcgatgtctggggccgtggcaccctggtcactgtctcctcag

SEQ ID NO: 4338 - protein, 117 aa, Artificial Sequence
  Description of Artificial Sequence: Synthetic polypeptide
QVQLQESGPGLVKPSQTLSLTCTVSGGSISSGGYYWSWIRQHPGKGLEWIGFIYYTGRTYYNPSLKSRLTISIDTSKNQFSLKLSSVTAADTAVYFCVRDLGYFDVWGRGTLVTVSS

SEQ ID NO: 4339 - protein, 9 aa, Artificial Sequence
  Description of Artificial Sequence: Synthetic peptide
VRDLGYFDV

SEQ ID NO: 4340 - DNA, 331 bp, Artificial Sequence
  Description of Artificial Sequence: Synthetic polynucleotide
  modified_base (9)..(9): a, c, t, g, unknown or other
cagtctgtnctgactcagcctgcctccgtgtctgggtctcctggacagtcgatcaccatctcctgcactggaaccagcagtgacgttaatttttataactatgtctcctggtaccaacagcagccaggcagagcccccaaactcgtgatgtatgaggtcaatcatcggccctcaggggtttctaatcgcttctctggctccaagtctggcaatacggcctccctgagcatctctgggctccaggctgaggacgaggctgattattactgcagctcatataccagcggcagcactagggtattcggcggagggaccaagctgaccgtcctag

SEQ ID NO: 4341 - protein, 110 aa, Artificial Sequence
  Description of Artificial Sequence: Synthetic polypeptide
QSVLTQPASVSGSPGQSITISCTGTSSDVNFYNYVSWYQQQPGRAPKLVMYEVNHRPSGVSNRFSGSKSGNTASLSISGLQAEDEADYYCSSYTSGSTRVFGGGTKLTVL

SEQ ID NO: 4342 - protein, 10 aa, Artificial Sequence
  Description of Artificial Sequence: Synthetic peptide
SSYTSGSTRV

SEQ ID NO: 4343 - DNA, 361 bp, Artificial Sequence
  Description of Artificial Sequence: Synthetic polynucleotide
caggtgcagctgcaggagtcgggcccaggactggtaaagccttcacagaccctgtccctcacctgcactgtctctggtggctccatcagaagtggtgattattactggacttggatccgccagcgcccagggaagggcctggagtggatggggcacgtctattacagcgggagtgcccagtacagcccgtccctgaagagtcgacttaccatatcaatagacacatctaagaaccaattctccctgaaactgaactctgtgactgccgcggacacggccgtctattactgtgcgagagatatggctcagatgtactactttgactactggggccagggaaccgtggtctccgtctcctcag

SEQ ID NO: 4344 - protein, 120 aa, Artificial Sequence
  Description of Artificial Sequence: Synthetic polypeptide
QVQLQESGPGLVKPSQTLSLTCTVSGGSIRSGDYYWTWIRQRPGKGLEWMGHVYYSGSAQYSPSLKSRLTISIDTSKNQFSLKLNSVTAADTAVYYCARDMAQMYYFDYWGQGTVVSVSS

SEQ ID NO: 4345 - protein, 12 aa, Artificial Sequence
  Description of Artificial Sequence: Synthetic peptide
ARDMAQMYYFDY

SEQ ID NO: 4346 - DNA, 333 bp, Artificial Sequence
  Description of Artificial Sequence: Synthetic polynucleotide
cagtctgtgctgactcagccaccctcagcgtctgggacccccggacagagggtcaccatctcttgttctggaagcagctccaacattggaagtaatgttgtgaactggtaccagcacctcccaggagcggcccccaaactcctcatctattttaataataagcggccctcaggggtccctgaccgattctctggctccaagtctggcacctcagcctccctggccatcagtgggctccagtctgaggatgaggctgattatttctgtgcaacatggaatgacgccctgaatggtttttatgtcttcggaactgggaccaaggtcaccgtccta

SEQ ID NO: 4347 - protein, 111 aa, Artificial Sequence
  Description of Artificial Sequence: Synthetic polypeptide
QSVLTQPPSASGTPGQRVTISCSGSSSNIGSNVVNWYQHLPGAAPKLLIYFNNKRPSGVPDRFSGSKSGTSASLAISGLQSEDEADYFCATWNDALNGFYVFGTGTKVTVL

SEQ ID NO: 4348 - protein, 12 aa, Artificial Sequence
  Description of Artificial Sequence: Synthetic peptide
ATWNDALNGFYV

SEQ ID NO: 4349 - DNA, 372 bp, Artificial Sequence
  Description of Artificial Sequence: Synthetic polynucleotide
  modified_base (24)..(24): a, c, t, g, unknown or other
  modified_base (26)..(26): a, c, t, g, unknown or other
caggtgcagctggtgcagtctggngntgagctgatgaagcctggggcctcagtgaagctttcctgcaaggctactggctacacattcactggctactggatagagtgggtaaagcagaggcctggacatggccttgagtggattggagagattttacctggaagtggtagtactaactacaatgagaagttcaagggcaaggccacattcactgcagatacatcctccaacacagcctacatgcaactcagcagcctgacaactgaggactctgccatctattactgtgcaagtagtgaggatgattacgacgacgggacctactggtacttcgatgtctggggcacagggaccacggtcaccgtctcctca

SEQ ID NO: 4350 - protein, 124 aa, Artificial Sequence
  Description of Artificial Sequence: Synthetic polypeptide
  MOD_RES (9)..(9): Any amino acid
QVQLVQSGXELMKPGASVKLSCKATGYTFTGYWIEWVKQRPGHGLEWIGEILPGSGSTNYNEKFKGKATFTADTSSNTAYMQLSSLTTEDSAIYYCASSEDDYDDGTYWYFDVWGTGTTVTVSS

SEQ ID NO: 4351 - protein, 17 aa, Artificial Sequence
  Description of Artificial Sequence: Synthetic peptide
ASSEDDYDDGTYWYFDV

SEQ ID NO: 4352 - DNA, 325 bp, Artificial Sequence
  Description of Artificial Sequence: Synthetic polynucleotide
gaaattgtgttgacgcagtctccaggcaccctgtctttgtctccaggggaaagagccaccctctcctgcagggccagtcagagtgttagcagcagctacttagcctggtaccagcagaaacctggccaggctcccaggctcctcatctatggtgcatccagcagggccactggcatcccagacaggttcagtggcagtgggtctgggacagacttcactctcaccatcagcagactggagcctgaagattttgcagtgtattactgtcagcagtatggtagctcgacgatcaccttcggccaagggacacgactggagattaaac

SEQ ID NO: 4353 - protein, 108 aa, Artificial Sequence
  Description of Artificial Sequence: Synthetic polypeptide
EIVLTQSPGTLSLSPGERATLSCRASQSVSSSYLAWYQQKPGQAPRLLIYGASSRATGIPDRFSGSGSGTDFTLTISRLEPEDFAVYYCQQYGSSTITFGQGTRLEIK

SEQ ID NO: 4354 - protein, 9 aa, Artificial Sequence
  Description of Artificial Sequence: Synthetic peptide
QQYGSSTIT

SEQ ID NO: 4355 - DNA, 370 bp, Artificial Sequence
  Description of Artificial Sequence: Synthetic polynucleotide
gaggtgcagctggtggagtctgggggaggcttggtccggcctgggggatatgtaagactctcctgtgcagcctctggattcacctttgacgacttttggatgagctgggtccgccaggctccagggaagggcctggagtgggtggccaatataaaaggagatggatctgagagtcattatgtggactctgtgaagggccgattcaccatctccagagacaacggcaagaggtcactacatctgcagatgaacagcctgagagccgccgacacggccgtctattactgtgcgagagcccgcggtaggccctactggggtggtgatgcttttgacatttggggccaagggaccatggtcaccgtctcttcag

SEQ ID NO: 4356 - protein, 123 aa, Artificial Sequence
  Description of Artificial Sequence: Synthetic polypeptide
EVQLVESGGGLVRPGGYVRLSCAASGFTFDDFWMSWVRQAPGKGLEWVANIKGDGSESHYVDSVKGRFTISRDNGKRSLHLQMNSLRAADTAVYYCARARGRPYWGGDAFDIWGQGTMVTVSS

SEQ ID NO: 4357 - protein, 16 aa, Artificial Sequence
  Description of Artificial Sequence: Synthetic peptide
ARARGRPYWGGDAFDI

SEQ ID NO: 4358 - DNA, 322 bp, Artificial Sequence
  Description of Artificial Sequence: Synthetic polynucleotide
gaaatagtgatgacgcagtctccagccaccctgtctgtgtctccaggggaaagcgccaccctctcctgcgaggccagtcagactgttaacagcaacctagcctggtaccagcagaaacctgggcaggctcccaggctcctcatttatgatgcaaccatcagggccactggaatcccagccaggttcagtggcagtgggttaacgacagacttcactctcaccatcagtggcctgcagtccgaagactttgcagtttattactgtcagcagtataataattggcctcggacgttcggccaagggaccaaggtagaaatcaaac

SEQ ID NO: 4359 - protein, 107 aa, Artificial Sequence
  Description of Artificial Sequence: Synthetic polypeptide
EIVMTQSPATLSVSPGESATLSCEASQTVNSNLAWYQQKPGQAPRLLIYDATIRATGIPARFSGSGLTTDFTLTISGLQSEDFAVYYCQQYNNWPRTFGQGTKVEIK

SEQ ID NO: 4360 - protein, 9 aa, Artificial Sequence
  Description of Artificial Sequence: Synthetic peptide
QQYNNWPRT

SEQ ID NO: 4361 - DNA, 379 bp, Artificial Sequence
  Description of Artificial Sequence: Synthetic polynucleotide
gaggtgcagctgttggagtctgggggaggcttggtacagcctggggagtccctgagactctcttgtgtcgcctctggattcagcttcagcgactatgccatgaactgggtccgccaggctccagggaaggggctggagtgggtctcaattattagtgataatggtgacgccacagagttcgcagactccgtgaagggccggttcaccatctccagagacaattccaagaacaccctacatctgcacatgaacagcctgagagtcgaagacacggccgtatatttctgtgcgaaatgggggttacggcgtcttggactttccggattgggcatcccacttgactactggggccagggagccctggtcatcgtctcctcag

SEQ ID NO: 4362 - protein, 126 aa, Artificial Sequence
  Description of Artificial Sequence: Synthetic polypeptide
EVQLLESGGGLVQPGESLRLSCVASGFSFSDYAMNWVRQAPGKGLEWVSIISDNGDATEFADSVKGRFTISRDNSKNTLHLHMNSLRVEDTAVYFCAKWGLRRLGLSGLGIPLDYWGQGALVIVSS

SEQ ID NO: 4363 - protein, 19 aa, Artificial Sequence
  Description of Artificial Sequence: Synthetic peptide
AKWGLRRLGLSGLGIPLDY

SEQ ID NO: 4364 - DNA, 325 bp, Artificial Sequence
  Description of Artificial Sequence: Synthetic polynucleotide
gacatccagatgacccagtctccatcctccctgtctgcatctgtaggagacagggtcaccgtcacttgccggacaagtcaggtcattggcatgtttttgaattggtatcagcacaaaccagggaaagcccctaaactcattatctatgctgcatccaatttgcatactggggtcccatcaaggttcagtggcggtggatctgggacagatttcagtctcaccatcagcagtctacaacctgaagattttgccacttattactgtcaacagagttacagtgccccctcgatcaccttcggccaagggacacgactggaaattaaac

SEQ ID NO: 4365 - protein, 108 aa, Artificial Sequence
  Description of Artificial Sequence: Synthetic polypeptide
DIQMTQSPSSLSASVGDRVTVTCRTSQVIGMFLNWYQHKPGKAPKLIIYAASNLHTGVPSRFSGGGSGTDFSLTISSLQPEDFATYYCQQSYSAPSITFGQGTRLEIK

SEQ ID NO: 4366 - protein, 10 aa, Artificial Sequence
  Description of Artificial Sequence: Synthetic peptide
QQSYSAPSIT

SEQ ID NO: 4367 - DNA, 378 bp, Artificial Sequence
  Description of Artificial Sequence: Synthetic polynucleotide
cagctgcagctgcaggagtcgggcccaggactggtgaagccttcggagaccctgtccctcacctgcactgtctctggtgactccattagcactagcagttactactggggctggatccgccagtccccaggtaaggggctggagtggtttggcagtatcttttacagtgggagcaccttctacaacccgtccctcaagactcgagccaccctgtcagtagacacgtccaacaaccagttctccctgaggctgacctctgtgaccgccgcggacacggccgtgtattactgtgcgagagatctcgggcatttttggcgtggccgtagggaccacggaatggacgtctggggccaagggattacggtcaccgtctcctca

SEQ ID NO: 4368 - protein, 126 aa, Artificial Sequence
  Description of Artificial Sequence: Synthetic polypeptide
QLQLQESGPGLVKPSETLSLTCTVSGDSISTSSYYWGWIRQSPGKGLEWFGSIFYSGSTFYNPSLKTRATLSVDTSNNQFSLRLTSVTAADTAVYYCARDLGHFWRGRRDHGMDVWGQGITVTVSS

SEQ ID NO: 4369 - protein, 18 aa, Artificial Sequence
  Description of Artificial Sequence: Synthetic peptide
ARDLGHFWRGRRDHGMDV

SEQ ID NO: 4370 - DNA, 319 bp, Artificial Sequence
  Description of Artificial Sequence: Synthetic polynucleotide
gacatccagatgacccagtctccttccaccctgtctacgtctgtaggagacagagtcacgctcacttgccgggccagtcaaagtgttggaaattggttggcctggtatcagcagaaaccagggaaagccccaaacctcctgatctataaggcgtctagtttagaaagtggggtcccatcaagattcagcggcagtggatctgggacagacttcactctcaccatcagcagcctgcaccctgatgattttgcaacttattactgccaaggctataataattatgcgtacacctttggccaggggaccaagctggagatca

SEQ ID NO: 4371 - protein, 106 aa, Artificial Sequence
  Description of Artificial Sequence: Synthetic polypeptide
DIQMTQSPSTLSTSVGDRVTLTCRASQSVGNWLAWYQQKPGKAPNLLIYKASSLESGVPSRFSGSGSGTDFTLTISSLHPDDFATYYCQGYNNYAYTFGQGTKLEI

SEQ ID NO: 4372 - protein, 9 aa, Artificial Sequence
  Description of Artificial Sequence: Synthetic peptide
QGYNNYAYT

SEQ ID NO: 4373 - DNA, 396 bp, Artificial Sequence
  Description of Artificial Sequence: Synthetic polynucleotide
caggtgcagctggtgcagtctggggctgaggtgaagaagcctgggtcctcggtgaaggtctcctgcaaggcttctggaggcaccttcagcaactatgctatcaactgggtgcgacaggcccctggacaagggcttgagtggatgggagggatcatccctatctctagtacagcaaactacgcacagaggttccagggcagagtcacgattagtgcggacgaatccacgaccacagtctacatggagctgagcagcctgagatctgaggacacggccgtatattcctgtgcgagagggcattactatgaaagtggtggttattatgccggcccccctttctactacttctacggtatggacgtctggggccaagggaccacggtcaccgtctcctca

SEQ ID NO: 4374 - protein, 132 aa, Artificial Sequence; identical to SEQ ID NO: 109
  Description of Artificial Sequence: Synthetic polypeptide

SEQ ID NO: 4375 - protein, 25 aa, Artificial Sequence
  Description of Artificial Sequence: Synthetic peptide
ARGHYYESGGYYAGPPFYYFYGMDV

SEQ ID NO: 4376 - DNA, 334 bp, Artificial Sequence
  Description of Artificial Sequence: Synthetic polynucleotide
gatattgtgatgactcagtctccactctccctgcccgtcacccctggagagccggcctccatctcctgcaggtctagtcagagcctcctgcttcataatggatacaactatttggattggtacctgcagaagccagggcagtctccacaactcctgatctatttgggttctaatcgggcctccggggtccctgacaggttcaggggcagtggatcaggcacagattttacactgaaaatcagcagagtggaggctgaggatgttggggtttattactgcatgcaagctctacaaaccctcactttcggcggagggaccaaggtggagatcaaac

SEQ ID NO: 4377 - protein, 111 aa, Artificial Sequence; identical to SEQ ID NO: 110
  Description of Artificial Sequence: Synthetic polypeptide

SEQ ID NO: 4378 - protein, 8 aa, Artificial Sequence
  Description of Artificial Sequence: Synthetic peptide
MQALQTLT

SEQ ID NO: 4379 - DNA, 349 bp, Artificial Sequence
  Description of Artificial Sequence: Synthetic polynucleotide
gaggtgcagctggtggagtctgggggaggcttggtaaagccagggcggtccctgagactctcctgtacagcttctggattcacctttggtgattatgctatcaactggttccgccaggctccggggaaggggctggagtgggtaggtttcattagaagcaaagtttttggtgggacaacggaatacgccgcgtctgtgaaagacagatttatcatctcaagggatgattccaaaagcatcgcctatctgcacatgaacagcctgaaaatcgatgacacagccgtgtattactgtagtagatccccctggccccactggggccagggaaccctggtcaccgtctcctcag

SEQ ID NO: 4380 - protein, 116 aa, Artificial Sequence
  Description of Artificial Sequence: Synthetic polypeptide
EVQLVESGGGLVKPGRSLRLSCTASGFTFGDYAINWFRQAPGKGLEWVGFIRSKVFGGTTEYAASVKDRFIISRDDSKSIAYLHMNSLKIDDTAVYYCSRSPWPHWGQGTLVTVSS

SEQ ID NO: 4381 - protein, 7 aa, Artificial Sequence
  Description of Artificial Sequence: Synthetic peptide
SRSPWPH

SEQ ID NO: 4382 - DNA, 320 bp, Artificial Sequence
  Description of Artificial Sequence: Synthetic polynucleotide
gacatccagatgacccagtctccatcctccctgtctgcatctgtaggagacagagtcaccatcacttgccaggcgagtcaggacattaagaacaatttaaattggtatcagcagaaaccagggaaagccccaaagctcctgatctacgatgcatccgatttggaaacaggggtcccatcaaggttcagtggaggtggatctggggcaggttttactttcaccatcagcagcctgcagcctgaagattttgcaacatattactgtcaacagtatgataatcttccctacacttttggccaggggaccaggctggagatcaa

SEQ ID NO: 4383 - protein, 106 aa, Artificial Sequence
  Description of Artificial Sequence: Synthetic polypeptide
DIQMTQSPSSLSASVGDRVTITCQASQDIKNNLNWYQQKPGKAPKLLIYDASDLETGVPSRFSGGGSGAGFTFTISSLQPEDFATYYCQQYDNLPYTFGQGTRLEI

SEQ ID NO: 4384 - protein, 9 aa, Artificial Sequence
  Description of Artificial Sequence: Synthetic peptide
QQYDNLPYT

SEQ ID NO: 4385 - DNA, 370 bp, Artificial Sequence
  Description of Artificial Sequence: Synthetic polynucleotide
gaggtgcagctggtggagtctgggggaggcttggtcctgccgggggggtatctaagactctcctgtgaggcctctggattcacctttaataacttttggatgagctgggtccgccaggctcctgggaaggggctggagtgggtggccaatataaaaggagatgcaactgagagtcattatgtggactctgtgaagggccgattcaccatttccagagacaacgccaagaggtcactgcatctgcaaatgaacagcctgagagccgacgacacggccgtctattactgtgcgagagcccgcggtaggccctactggggaggtgatgcttttgatatctggggccaagggaccatggtcaccgtctcttcag

SEQ ID NO: 4386 - protein, 123 aa, Artificial Sequence; identical to SEQ ID NO: 93
  Description of Artificial Sequence: Synthetic polypeptide

SEQ ID NO: 4387 - protein, 16 aa, Artificial Sequence
  Description of Artificial Sequence: Synthetic peptide
ARARGRPYWGGDAFDI

SEQ ID NO: 4388 - DNA, 322 bp, Artificial Sequence
  Description of Artificial Sequence: Synthetic polynucleotide
gaaatagtgatgacgcagtctccagccaccctgtctgtgtctccaggggaaagagccaccctctcctgcagggccagtcagactgttaacagcaacttagcctggtaccagcagaaacctggccaggctcccaggctcctcatctatgatgcaaccatcagggccactggtatcccagccaggttcagtggcagtgggtctacgacagacttcactctcaccatcagcagcctacagtctgaagattttgcagtttattactgtcagcagtataataattggcctcggacgttcggccaagggaccaaggtagacatcaaac

SEQ ID NO: 4389 - protein, 107 aa, Artificial Sequence
  Description of Artificial Sequence: Synthetic polypeptide
EIVMTQSPATLSVSPGERATLSCRASQTVNSNLAWYQQKPGQAPRLLIYDATIRATGIPARFSGSGSTTDFTLTISSLQSEDFAVYYCQQYNNWPRTFGQGTKVDIK

SEQ ID NO: 4390 - protein, 9 aa, Artificial Sequence
  Description of Artificial Sequence: Synthetic peptide
QQYNNWPRT

SEQ ID NO: 4391 - DNA, 384 bp, Artificial Sequence
  Description of Artificial Sequence: Synthetic polynucleotide
caggtgcagctggtgcagtctgggactgaggtgaagaagcctggggcctcagtgaaggtctcctgcaaggcttctggatacaccttcaccggctactatatacactgggtgcgacaggcccctggccaagggcttgagtggatgggatggatcaaccctaacagtggtggcacaaactatgcacagaagtttcagggctgggtcaccatgaccagggacacgtccatcagcacagcctacatggagctgaggaggctgaaatctgacgacacggccgtgtattactgtgcgaggagtatgatttttggagtggttattaatcccaactcctactcctacggtctggacgtctggggccaagggaccacggtcaccgtctcctca

SEQ ID NO: 4392 - protein, 128 aa, Artificial Sequence; identical to SEQ ID NO: 107
  Description of Artificial Sequence: Synthetic polypeptide

SEQ ID NO: 4393 - protein, 21 aa, Artificial Sequence
  Description of Artificial Sequence: Synthetic peptide
ARSMIFGVVINPNSYSYGLDV

SEQ ID NO: 4394 - DNA, 322 bp, Artificial Sequence; identical to SEQ ID NO: 226
  Description of Artificial Sequence: Synthetic polynucleotide

SEQ ID NO: 4395 - protein, 107 aa, Artificial Sequence; identical to SEQ ID NO: 108
  Description of Artificial Sequence: Synthetic polypeptide

SEQ ID NO: 4396 - protein, 9 aa, Artificial Sequence
  Description of Artificial Sequence: Synthetic peptide
QHYYNWLWT

SEQ ID NO: 4397 - DNA, 381 bp, Artificial Sequence
  Description of Artificial Sequence: Synthetic polynucleotide
caggtgcagctggtgcagtctggggctgaggtgaagaagcctggggcctcagtcaaggtctcctgcaaggcttctggatacaccttcaccgactactatatccactgggtgcgacaggcccctggacaagggcttgagtggatgggatggatcaaccctaccagtggtggcacaaattatgcacagaagtttcagggccgggtcaccatgaccagggagacgtccatcagcacagcctacatggagttcagcaggctgagattcgacgacacggccgtatattattgtgcgaggagtatgatttttggagtggttaggactcctacatactactacggcatggacgtctggggccaagggacgacggtcaccgtctcctca

SEQ ID NO: 4398 - protein, 127 aa, Artificial Sequence; identical to SEQ ID NO: 99
  Description of Artificial Sequence: Synthetic polypeptide

SEQ ID NO: 4399 - protein, 20 aa, Artificial Sequence
  Description of Artificial Sequence: Synthetic peptide
ARSMIFGVVRTPTYYYGMDV

SEQ ID NO: 4400 - DNA, 322 bp, Artificial Sequence
  Description of Artificial Sequence: Synthetic polynucleotide
gaaatagtgatgacgcagtctccagccaccctgtctgtgtctccaggggaaagagccaccctctcctgcagggccagtcagagtattagcaccaacttagcctggtaccagcacaaacctgggcagcctccccggctcctcatttttggtgcgtccaccagggccactggtatcccagccaggttcagtggcagtgggtctgggacagagttcactctcaccatcagcagcctgcagtctgaagattttgcagtttattactgtcagcactattataattggctctggacgttcggccaagggaccaaggtggaaatcaaac

SEQ ID NO: 4401 - protein, 107 aa, Artificial Sequence
  Description of Artificial Sequence: Synthetic polypeptide
EIVMTQSPATLSVSPGERATLSCRASQSISTNLAWYQHKPGQPPRLLIFGASTRATGIPARFSGSGSGTEFTLTISSLQSEDFAVYYCQHYYNWLWTFGQGTKVEIK

SEQ ID NO: 4402 - protein, 9 aa, Artificial Sequence
  Description of Artificial Sequence: Synthetic peptide
QHYYNWLWT

SEQ ID NO: 4403 - DNA, 355 bp, Artificial Sequence
  Description of Artificial Sequence: Synthetic polynucleotide
gaggtgcagctggtggagtctgggggaggcttggtacagccgggggggtccctgagattgtcctgtgcagcctcgggcttcaccttcagtcatcatagaatgaactgggtccgccaggctccagggaaggggctggagtgggttgcatatattagtacgactagtactacgatacactatgcagagtctgtgaagggccgattcaccatctccagagacaacgccaagaactcactgtatctgcaaatgaacagcctgagagccgaggacacggctatgtactactgtgcgagagatttacaggtttggacggccgacccctggggccagggaaccctggtcaccgtctcctcag

SEQ ID NO: 4404 - protein, 118 aa, Artificial Sequence
  Description of Artificial Sequence: Synthetic polypeptide
EVQLVESGGGLVQPGGSLRLSCAASGFTFSHHRMNWVRQAPGKGLEWVAYISTTSTTIHYAESVKGRFTISRDNAKNSLYLQMNSLRAEDTAMYYCARDLQVWTADPWGQGTLVTVSS

SEQ ID NO: 4405 - protein, 11 aa, Artificial Sequence
  Description of Artificial Sequence: Synthetic peptide
ARDLQVWTADP

SEQ ID NO: 4406 - DNA, 322 bp, Artificial Sequence
  Description of Artificial Sequence: Synthetic polynucleotide
gacatccagatgacccagtctccatcctccctgtctgcatctgtaggaggcagagtcaccatcacctgccaggcgagtcaggacattagaaactttttaaattggtatcagcagaaaccagggaaagcccctaaggtcctgatctacgatgcatccaatttggaagcaggggtcccctcaaggttcagtgggagtggatctgggacacattttactttcaccatcagcagcctgcagcctgaagacattgcaacatattactgtcaacaatatgataatctcccgtacacttttggccaggggaccaagctggagatcaaac

SEQ ID NO: 4407 - protein, 107 aa, Artificial Sequence
  Description of Artificial Sequence: Synthetic polypeptide
DIQMTQSPSSLSASVGGRVTITCQASQDIRNFLNWYQQKPGKAPKVLIYDASNLEAGVPSRFSGSGSGTHFTFTISSLQPEDIATYYCQQYDNLPYTFGQGTKLEIK

SEQ ID NO: 4408 - protein, 9 aa, Artificial Sequence
  Description of Artificial Sequence: Synthetic peptide
QQYDNLPYT

SEQ ID NO: 4409 - DNA, 384 bp, Artificial Sequence
  Description of Artificial Sequence: Synthetic polynucleotide
caggtgcagctggtgcagtctggggctgaggtgaagaagcctggggcctcagtgaaggtctcctgcaaggcttctggatacaccttcaccgactactatatccactgggtgcgacaggcccctggacaggggcttgagtggatgggatggatcaatatttacagtggtggcacaaattttgcacagaaatttcagggccgggtcaccctggccagggacacgtccaccaacacagcccacatggagctgagcaggctgagatctggcgacacagccgtctattactgtgcgaggagtatgattttcggattgggtcatgctcctaatgactattattatggaatggacgtctggggccaagggaccacggtcaccgtctcctca

SEQ ID NO: 4410 - protein, 128 aa, Artificial Sequence
  Description of Artificial Sequence: Synthetic polypeptide
QVQLVQSGAEVKKPGASVKVSCKASGYTFTDYYIHWVRQAPGQGLEWMGWINIYSGGTNFAQKFQGRVTLARDTSTNTAHMELSRLRSGDTAVYYCARSMIFGLGHAPNDYYYGMDVWGQGTTVTVSS

SEQ ID NO: 4411 - protein, 21 aa, Artificial Sequence
  Description of Artificial Sequence: Synthetic peptide
ARSMIFGLGHAPNDYYYGMDV

SEQ ID NO: 4412 - DNA, 322 bp, Artificial Sequence
  Description of Artificial Sequence: Synthetic polynucleotide
gaaatagtgatgacgcagtctccagccaccctgtctgtgtctccaggggaaagagccaccctctcctgtagggccagtcagactgtaagcatcaacttagcctggtaccagcagaaacctgggcagtctcctaggctcctcatctatggtgcatccaccagggccactggtgtcccagccaggttcagtggcagtgggtctgggacagagttcactctctccatcagcaacctgcagtctgaagattttgcggtttattattgtcagcattattacaactggcactgggcgttcggccaagggaccaaggtggagatcaaac

SEQ ID NO: 4413 - protein, 107 aa, Artificial Sequence
  Description of Artificial Sequence: Synthetic polypeptide
EIVMTQSPATLSVSPGERATLSCRASQTVSINLAWYQQKPGQSPRLLIYGASTRATGVPARFSGSGSGTEFTLSISNLQSEDFAVYYCQHYYNWHWAFGQGTKVEIK

SEQ ID NO: 4414 - protein, 9 aa, Artificial Sequence
  Description of Artificial Sequence: Synthetic peptide
QHYYNWHWA

SEQ ID NO: 4415 - DNA, 384 bp, Artificial Sequence
  Description of Artificial Sequence: Synthetic polynucleotide
caggtgcagctggtgcagtctggggctgaggtgaagaagcctggggcctcagtgaaggtctcctgcaaggcttctggatacaccttcaccggctactatatacactgggtgcgacaggcccctggacaagggcttgagtggatgggatggatcaaccctaacagtggtggcacaaattatgcacagaagtttcagggctgggtcaccatgaccagggacacgtccatcaccacagcctacatggagctgaggaggctgagatctgacgacacggccgtgtattactgtgcgaggagtatgatttttggggtggttattaatcccaactactactcctacggtctggacgtctggggccaagggaccacggtcaccgtctcctca

SEQ ID NO: 4416 - protein, 128 aa, Artificial Sequence
  Description of Artificial Sequence: Synthetic polypeptide
QVQLVQSGAEVKKPGASVKVSCKASGYTFTGYYIHWVRQAPGQGLEWMGWINPNSGGTNYAQKFQGWVTMTRDTSITTAYMELRRLRSDDTAVYYCARSMIFGVVINPNYYSYGLDVWGQGTTVTVSS

SEQ ID NO: 4417 - protein, 21 aa, Artificial Sequence
  Description of Artificial Sequence: Synthetic peptide
ARSMIFGVVINPNYYSYGLDV

SEQ ID NO: 4418 - DNA, 322 bp, Artificial Sequence
  Description of Artificial Sequence: Synthetic polynucleotide
gaaatagtgatgacgcagtctccagccaccctgtctgtgtctccaggggaaagagccaccctctcctgcagggccagtcagagtgttagcagcaacttagcctggtaccagcagaaacctgggcaggctcccaggctcctcatctatggtgcatccaccagggccactggtatcccagccaggttcagtggcagtgggtctgggacagagttcactctcaccatcagcagcctacagtctgaggattttgggttttattactgtcagcattattataactggctctggacgttcggccaagggaccaaggtggaaatcaaac

SEQ ID NO: 4419 - protein, 107 aa, Artificial Sequence
  Description of Artificial Sequence: Synthetic polypeptide
EIVMTQSPATLSVSPGERATLSCRASQSVSSNLAWYQQKPGQAPRLLIYGASTRATGIPARFSGSGSGTEFTLTISSLQSEDFGFYYCQHYYNWLWTFGQGTKVEIK

SEQ ID NO: 4420 - protein, 9 aa, Artificial Sequence
  Description of Artificial Sequence: Synthetic peptide
QHYYNWLWT

SEQ ID NO: 4421 - DNA, 363 bp, Artificial Sequence
  Description of Artificial Sequence: Synthetic polynucleotide
cagctgcagctgcaggagtccggctcaggactggtgaagccttcacagaccctgtccctcacctgcgctgtctctggtggctccatcagcagtggtggtttcccctggagctggatccggcagccaccagggaaggccctggagtggattgggtacatctatcatattgggagcacctactacaacccgtccctcaagagtcgagtcaccatatcagtagacaggtccaagaaccagttctccctgaagctgagatcggtgaccgccgcggacacggccgtgtattactgtgccacagtgtccgggccctacttctacggtatggacgtctggggccaagggaccacggtcaccgtctcctca

SEQ ID NO: 4422 - protein, 121 aa, Artificial Sequence
  Description of Artificial Sequence: Synthetic polypeptide
QLQLQESGSGLVKPSQTLSLTCAVSGGSISSGGFPWSWIRQPPGKALEWIGYIYHIGSTYYNPSLKSRVTISVDRSKNQFSLKLRSVTAADTAVYYCATVSGPYFYGMDVWGQGTTVTVSS

SEQ ID NO: 4423 - protein, 13 aa, Artificial Sequence
  Description of Artificial Sequence: Synthetic peptide
ATVSGPYFYGMDV

SEQ ID NO: 4424 - DNA, 322 bp, Artificial Sequence
  Description of Artificial Sequence: Synthetic polynucleotide
gacatccagatgacccagtctccatcctccctgtctgcatctgtaggagacagagtcaccatcacttgccgggcaagtcagagcattagcaactatttaaattggtatcagcagaaaccagggaaagcccctaagctcctgatctatgctgcatccagtttgcaaagtggggtcccatcaaggttcagtggcagtggatctgggacagatttcactctcaccatcagcagtctgcaacctgaagattgtgcaacttactcctgtcaacagagttacagtcccccgtacacttttggccaggggaccaaactggagatcaaac

SEQ ID NO: 4425 - protein, 107 aa, Artificial Sequence
  Description of Artificial Sequence: Synthetic polypeptide
DIQMTQSPSSLSASVGDRVTITCRASQSISNYLNWYQQKPGKAPKLLIYAASSLQSGVPSRFSGSGSGTDFTLTISSLQPEDCATYSCQQSYSPPYTFGQGTKLEIK

SEQ ID NO: 4426 - protein, 9 aa, Artificial Sequence
  Description of Artificial Sequence: Synthetic peptide
QQSYSPPYT

SEQ ID NO: 4427 - DNA, 384 bp, Artificial Sequence
  Description of Artificial Sequence: Synthetic polynucleotide
caggtgcagctggtgcagtctggggctgaggtgaagaagcctggggcctcagtgaaggtctcctgcaaggcttctggatacaccttcaccggctactacatacactgggtccgacaggcccctggacaaggccttgagtggatgggatggatcaacgcttacagcggtggcacaaactatgtagagaagtttcagggccgggtcaccatgaccagggacacgcccatccgcacagcctacatggagctgagcagactaagatctgacgacacggccgtctattactgtgcgaggagtatgattttcggattggctaattctcctaatgattattattatggtatggacgtctggggccaagggacgacggtcaccgtctcctca

SEQ ID NO: 4428 - protein, 128 aa, Artificial Sequence
  Description of Artificial Sequence: Synthetic polypeptide
QVQLVQSGAEVKKPGASVKVSCKASGYTFTGYYIHWVRQAPGQGLEWMGWINAYSGGTNYVEKFQGRVTMTRDTPIRTAYMELSRLRSDDTAVYYCARSMIFGLANSPNDYYYGMDVWGQGTTVTVSS

SEQ ID NO: 4429 - protein, 21 aa, Artificial Sequence
  Description of Artificial Sequence: Synthetic peptide
ARSMIFGLANSPNDYYYGMDV

SEQ ID NO: 4430 - DNA, 320 bp, Artificial Sequence
  Description of Artificial Sequence: Synthetic polynucleotide
gaaatagtgatgacgcagtctccagccaccctgtctgtgtctccaggggaaagagccaccctctcctgcagggccagtcagagtgttagcgtcaacttagcctggtaccagcagaaacctgggcagtctcccaggctcctcatctatagtgcgtccaccagggccactggtatcccagccaggttcagtggcagtgggtctgggacagagttcactctcaccatcagcagcctgcagtctgatgattttgcagtttattactgtcagcactattatgactggtcctggtccttcggccaagggaccaaggtggagatcaa

SEQ ID NO: 4431 - protein, 106 aa, Artificial Sequence
  Description of Artificial Sequence: Synthetic polypeptide
EIVMTQSPATLSVSPGERATLSCRASQSVSVNLAWYQQKPGQSPRLLIYSASTRATGIPARFSGSGSGTEFTLTISSLQSDDFAVYYCQHYYDWSWSFGQGTKVEI

SEQ ID NO: 4432 - protein, 9 aa, Artificial Sequence
  Description of Artificial Sequence: Synthetic peptide
QHYYDWSWS

SEQ ID NO: 4433 - DNA, 372 bp, Artificial Sequence
  Description of Artificial Sequence: Synthetic polynucleotide
caggtgcagctggtgcagtctggagctgagctgatgaagcctggggcctcagtgaagctttcctgcaaggctactggctacacattcactggctactggatagagtgggtaaagcagaggcctggacatggccttgagtggattggagagattttacctggaagtggtagtactaactacaatgagaagttcaagggcaaggccacattcactgcagatacatcctccaacacagcctacatgcaactcagcagcctgacaactgaggactctgccatctattactgtgcaagtagtgaggatgattacgacgacgggacctactggtacttcgatgtctggggcacagggaccacggtcaccgtctcctca

SEQ ID NO: 4434 - protein, 124 aa, Artificial Sequence
  Description of Artificial Sequence: Synthetic polypeptide
QVQLVQSGAELMKPGASVKLSCKATGYTFTGYWIEWVKQRPGHGLEWIGEILPGSGSTNYNEKFKGKATFTADTSSNTAYMQLSSLTTEDSAIYYCASSEDDYDDGTYWYFDVWGTGTTVTVSS

SEQ ID NO: 4435 - protein, 17 aa, Artificial Sequence
  Description of Artificial Sequence: Synthetic peptide
ASSEDDYDDGTYWYFDV

SEQ ID NO: 4436 - DNA, 322 bp, Artificial Sequence
  Description of Artificial Sequence: Synthetic polynucleotide
gacatccagatgacccagtctccatcctccctgtctgcatctgtaggagacagagtcaccatcacttgccgggcaagtcagagcattagcacctatttaaattggtatcagcagaaaccagggaaagcccctaagctcctgatctatgctgcatccagtttgcaaagtggggtcccatcaaggttcagtggcagtggatctgggtcagatttcactctcaccatcagcagtctgcaacttgaagattttgcaacttactactgtcaacagagttacagtacccctcccacttttggccaggggaccaagctggagatcaaac

SEQ ID NO: 4437 - protein, 107 aa, Artificial Sequence
  Description of Artificial Sequence: Synthetic polypeptide
DIQMTQSPSSLSASVGDRVTITCRASQSISTYLNWYQQKPGKAPKLLIYAASSLQSGVPSRFSGSGSGSDFTLTISSLQLEDFATYYCQQSYSTPPTFGQGTKLEIK

SEQ ID NO: 4438 - protein, 9 aa, Artificial Sequence
  Description of Artificial Sequence: Synthetic peptide
QQSYSTPPT

SEQ ID NO: 4439 - DNA, 396 bp, Artificial Sequence
  Description of Artificial Sequence: Synthetic polynucleotide
caggtgcagctggtgcagtctggggctgaggtgaagaagcctgggtcctcggtgaaggtctcctgcaaggcttctggaggcaccttcagcaactatgctatcaactgggtgcgacagggccctggacaagggcttgagtggatgggagggatcatccctatctctggtacagcaaactacgcacagaggttccagggcagagtcacgattagtgcggacgaatccacgagcacagtctacatggagctgagcagcctgagatctgaggacacggccgtatattcctgtgcgagagggcattactatgaaagtagtggctattatgccggcccccctttctactacttctacggtatggacgtctggggccaagggaccacggtcaccgtctcctca

SEQ ID NO: 4440 - protein, 132 aa, Artificial Sequence
  Description of Artificial Sequence: Synthetic polypeptide
QVQLVQSGAEVKKPGSSVKVSCKASGGTFSNYAINWVRQGPGQGLEWMGGIIPISGTANYAQRFQGRVTISADESTSTVYMELSSLRSEDTAVYSCARGHYYESSGYYAGPPFYYFYGMDVWGQGTTVTVSS

SEQ ID NO: 4441 - protein, 25 aa, Artificial Sequence
  Description of Artificial Sequence: Synthetic peptide
ARGHYYESSGYYAGPPFYYFYGMDV

SEQ ID NO: 4442 - DNA, 334 bp, Artificial Sequence; identical to SEQ ID NO: 4376
  Description of Artificial Sequence: Synthetic polynucleotide

SEQ ID NO: 4443 - protein, 111 aa, Artificial Sequence; identical to SEQ ID NO: 110
  Description of Artificial Sequence: Synthetic polypeptide

SEQ ID NO: 4444 - protein, 8 aa, Artificial Sequence
  Description of Artificial Sequence: Synthetic peptide
MQALQTLT

SEQ ID NO: 4445 - DNA, 355 bp, Artificial Sequence
  Description of Artificial Sequence: Synthetic polynucleotide
caggtgcagctggtgcagtctggggctgaggtgaagaagcctgggtcctcggtgaaggtctcctgcaaggcttctggaggcaccttcagcaactatgctgtcagctgggtgcgacaggtccctggacaagggcttgagtggatgggagagatcatccctatatttgctacaccaaattacgcacagaaattccggggcagactcacgattaccgcggacacatccacgagcacagcctacatggagctgagcagcctgagatctgaggacacggccttttattactgtgcgcgtgacggggggcaaggtagttttgactactggggccagggaaccctggtcaccgtctcctcag

SEQ ID NO: 4446 - protein, 118 aa, Artificial Sequence
  Description of Artificial Sequence: Synthetic polypeptide
QVQLVQSGAEVKKPGSSVKVSCKASGGTFSNYAVSWVRQVPGQGLEWMGEIIPIFATPNYAQKFRGRLTITADTSTSTAYMELSSLRSEDTAFYYCARDGGQGSFDYWGQGTLVTVSS

SEQ ID NO: 4447 - protein, 11 aa, Artificial Sequence
  Description of Artificial Sequence: Synthetic peptide
ARDGGQGSFDY

SEQ ID NO: 4448 - DNA, 337 bp, Artificial Sequence
  Description of Artificial Sequence: Synthetic polynucleotide
gatattgtgatgactcagtctccactctccctgcccgtcacccctggagagccggcctccatctcctgcaggtctagtcagagcctcctgcatcgtagtggatacaattatttggattggtacctgcagaagccagggcagtctccacagctcctgatctatttgggttctaatcgggcctccggggtccctgacaggttcagtggcagtggatcaggcacagattttacactgaaaatcagcagagtggaggctgaggatgttggggtttattactgcatgcaagctctacaaactcccaggacgttcggccaagggaccaaggtggaaatcaaac

SEQ ID NO: 4449 - protein, 112 aa, Artificial Sequence
  Description of Artificial Sequence: Synthetic polypeptide
DIVMTQSPLSLPVTPGEPASISCRSSQSLLHRSGYNYLDWYLQKPGQSPQLLIYLGSNRASGVPDRFSGSGSGTDFTLKISRVEAEDVGVYYCMQALQTPRTFGQGTKVEIK

SEQ ID NO: 4450 - protein, 9 aa, Artificial Sequence
  Description of Artificial Sequence: Synthetic peptide
MQALQTPRT

SEQ ID NO: 4451 - DNA, 355 bp, Artificial Sequence
  Description of Artificial Sequence: Synthetic polynucleotide
caggtgcagctggtgcagtctggggctgaggtgaggaagcctgggtcctcggtgaaggtctcctgcaaggcctcaggaggcaccttcagtaactatgctatcagttgggtgcgacaggccccgggacacgggcttgagtggatgggagggattatccctttctttggtaaaccaaactactcacagaagttccggggcagagtcaccattaccgcggacgaatctacgagcacagcctacatggaactggccagcctgaaatctgacgacacggccatctattactgtgcgagagagggggggctacgaaactttgactactggggccagggaaccctggtcaccgtctcctcag

SEQ ID NO: 4452 - protein, 118 aa, Artificial Sequence
  Description of Artificial Sequence: Synthetic polypeptide
QVQLVQSGAEVRKPGSSVKVSCKASGGTFSNYAISWVRQAPGHGLEWMGGIIPFFGKPNYSQKFRGRVTITADESTSTAYMELASLKSDDTAIYYCAREGGLRNFDYWGQGTLVTVSS

SEQ ID NO: 4453 - protein, 11 aa, Artificial Sequence
  Description of Artificial Sequence: Synthetic peptide
AREGGLRNFDY

SEQ ID NO: 4454 - DNA, 337 bp, Artificial Sequence
  Description of Artificial Sequence: Synthetic polynucleotide
gatattgtgatgactcagtctccactctccctgcccgtcacccctggagagccggcctccatctcctgcaggtctagtcagagcctcctgcataggagtggagacaactatttggattggtatctgcagaagccagggcagtctccacagctcctgatctattggggttctaatcgggcctccggggtccctgataggttcagtggcagtggatcaggcacagattttacactgaaaatcagcagagtggaggctggggatgttggggtttattactgcatgcaagctctacaaccctcgatcaccttcggccaagggacacgactggagatcaaac

SEQ ID NO: 4455 - protein, 112 aa, Artificial Sequence
  Description of Artificial Sequence: Synthetic polypeptide
DIVMTQSPLSLPVTPGEPASISCRSSQSLLHRSGDNYLDWYLQKPGQSPQLLIYWGSNRASGVPDRFSGSGSGTDFTLKISRVEAGDVGVYYCMQALQPSITFGQGTRLEIK

SEQ ID NO: 4456 - protein, 9 aa, Artificial Sequence
  Description of Artificial Sequence: Synthetic peptide
MQALQPSIT

SEQ ID NO: 4457 - DNA, 355 bp, Artificial Sequence
  Description of Artificial Sequence: Synthetic polynucleotide
caggtgcagctggtgcagtctggggctgaggtgaagaagcctgggtcctcggtgagggtctcctgcaaggcttctggaggcaccttcagcaactatgctatcgactgggtgcgacaggcccctggacaagggcttgagtgggtgggagggatcatccctctctttgctacggcaaactacgcacagaagttccagggcagagtcacaattaccgcggacgcatccacgagcacagcctacatggagtttaagagcctgagatctgaggacacggccatgtattactgtgcgagagatgattccattacacccttagggtactggggcctgggaaccctggtcaccgtctcctcag

SEQ ID NO: 4458 - protein, 118 aa, Artificial Sequence
  Description of Artificial Sequence: Synthetic polypeptide
QVQLVQSGAEVKKPGSSVRVSCKASGGTFSNYAIDWVRQAPGQGLEWVGGIIPLFATANYAQKFQGRVTITADASTSTAYMEFKSLRSEDTAMYYCARDDSITPLGYWGLGTLVTVSS

SEQ ID NO: 4459 - protein, 11 aa, Artificial Sequence
  Description of Artificial Sequence: Synthetic peptide
ARDDSITPLGY

SEQ ID NO: 4460 - DNA, 337 bp, Artificial Sequence
  Description of Artificial Sequence: Synthetic polynucleotide
gatattgtgatgactcagtctccactctccctgcccgtcacccctggagagccggcctccatctcctgcaggtctagtcagagcctcctgcatagtaatggatacaactatttggattggtacctgcagaagccagggcagtctccacagctcctgatctatttgggttctcatcgggcctccggggtccctgacaggttcagtggcagtggatcaggcacagattttacactgaaaatcagcagagtggaggctgaggatgttggggtttattactgcatgcaagctcgacaaagtccgtacacttttggccaggggaccaagctggagatcaaac

SEQ ID NO: 4461 - protein, 112 aa, Artificial Sequence
  Description of Artificial Sequence: Synthetic polypeptide
DIVMTQSPLSLPVTPGEPASISCRSSQSLLHSNGYNYLDWYLQKPGQSPQLLIYLGSHRASGVPDRFSGSGSGTDFTLKISRVEAEDVGVYYCMQARQSPYTFGQGTKLEIK

SEQ ID NO: 4462 - protein, 9 aa, Artificial Sequence
  Description of Artificial Sequence: Synthetic peptide
MQARQSPYT

SEQ ID NO: 4463 - DNA, 372 bp, Artificial Sequence
  Description of Artificial Sequence: Synthetic polynucleotide
caggtgcagctggtgcagtctggagttgagctgatgaagcctggggcctcagtgaagctttcctgcaaggctactggctacacattcactggctactggatagagtgggtaaagcagaggcctggacatggccttgagtggattggagagattttacctggaagtggtagtactaactacaatgagaagttcaagggcaaggccacattcactgcagatacatcctccaacacagcctacatgcaactcagcagcctgacaactgaggactctgccatctattactgtgcaagtagtgaggatgattacgacgacgggacctactggtacttcgatgtctggggcacagggaccacggtcaccgtctcctca

SEQ ID NO: 4464 - protein, 124 aa, Artificial Sequence
  Description of Artificial Sequence: Synthetic polypeptide
QVQLVQSGVELMKPGASVKLSCKATGYTFTGYWIEWVKQRPGHGLEWIGEILPGSGSTNYNEKFKGKATFTADTSSNTAYMQLSSLTTEDSAIYYCASSEDDYDDGTYWYFDVWGTGTTVTVSS

SEQ ID NO: 4465 - protein, 17 aa, Artificial Sequence
  Description of Artificial Sequence: Synthetic peptide
ASSEDDYDDGTYWYFDV

SEQ ID NO: 4466 - DNA, 318 bp, Artificial Sequence
  Description of Artificial Sequence: Synthetic polynucleotide
gaaatagtgatgacgcagtctccagccaccctgtctgtgtctccaggggaaagagccaccctctcctgcagggccagtcagagtcttaacagcaacttagcctggtaccagcagaaacctgggcaggctcccaggctcctcatctatgatgtatccatcagggccactggtatcccagccaggttcagtggcagtgggtctgcgacagagttcactctcaccatcaacagcctgcagtctgaagattttgcagtttattattgtcagcagtataatgactggcctcggacgttcggccaagggtccaaggtggaaatc

SEQ ID NO: 4467 - protein, 106 aa, Artificial Sequence
  Description of Artificial Sequence: Synthetic polypeptide
EIVMTQSPATLSVSPGERATLSCRASQSLNSNLAWYQQKPGQAPRLLIYDVSIRATGIPARFSGSGSATEFTLTINSLQSEDFAVYYCQQYNDWPRTFGQGSKVEI

SEQ ID NO: 4468 - protein, 9 aa, Artificial Sequence
  Description of Artificial Sequence: Synthetic peptide
QQYNDWPRT

SEQ ID NO: 4469 - DNA, 355 bp, Artificial Sequence
  Description of Artificial Sequence: Synthetic polynucleotide
caggtgcagctggtgcagtctggggctgaggtgaagaagcctgggtcctcggtgaaggtctcctgcaaggcttctggaggcaccttcagcaactatgatatcagctgggtgcgacaggcccctggacaagggcttgagtggatgggagggatcatccctatctttggtacaccaaactacgcacagaagttccagggcagagtcacgattaccgcggacgaatccacgagcacagcctacatggagctgagcagcctgagatctgaggactcggccatttatttctgtgcgagagtgtccggggcgggatcctatgaccactggggccagggaaccctggtcaccgtctcctcag

SEQ ID NO: 4470 - protein, 118 aa, Artificial Sequence
  Description of Artificial Sequence: Synthetic polypeptide
QVQLVQSGAEVKKPGSSVKVSCKASGGTFSNYDISWVRQAPGQGLEWMGGIIPIFGTPNYAQKFQGRVTITADESTSTAYMELSSLRSEDSAIYFCARVSGAGSYDHWGQGTLVTVSS

SEQ ID NO: 4471 - protein, 11 aa, Artificial Sequence
  Description of Artificial Sequence: Synthetic peptide
ARVSGAGSYDH

SEQ ID NO: 4472 - DNA, 337 bp, Artificial Sequence
  Description of Artificial Sequence: Synthetic polynucleotide
gatattgtgatgactcagtctccactctccctgcccgtcacccctggagagccggcctccatctcctgcaggtctagtcagagcctcctgcatagtaatggatacaactatttggattggtacctgcagaagccagggcagtctccacagctcctgatctatttgggttctaatcgggcctccggggtccctgacaggttcagtggcagtggatcaggcacagattttacactgaaaatcagcagagtggaggctgaggatgttggggtttattactgcatgcaagctctacaaactccccggactttcggcggagggaccaaggtggagatcaaac

SEQ ID NO: 4473 - protein, 112 aa, Artificial Sequence
  Description of Artificial Sequence: Synthetic polypeptide
DIVMTQSPLSLPVTPGEPASISCRSSQSLLHSNGYNYLDWYLQKPGQSPQLLIYLGSNRASGVPDRFSGSGSGTDFTLKISRVEAEDVGVYYCMQALQTPRTFGGGTKVEIK

SEQ ID NO: 4474 - protein, 9 aa, Artificial Sequence
  Description of Artificial Sequence: Synthetic peptide
MQALQTPRT

SEQ ID NO: 4475 - DNA, 370 bp, Artificial Sequence
  Description of Artificial Sequence: Synthetic polynucleotide
gaggtgcagctggtggagtctgggggaggcttggtcctgcctggggggtacctgagactctcctgtgcagcctctggattcagctttagtaacttttggatgagctgggtccgccaggctccagggaaggggctggagtgggtggccagcgtaaggggagatggaagtgagaatcactatgtggactctgtgaagggccgattcaccatctcgagagacaacgccaagaagtcactgcatctgcacctgaacagcctgagagccgaggatacggccgtgtattactgtgcgagagcccgcggtaggccctattggggaggtgatgcttttgatatctggggccaaggcacaatggtcaccgtctcttcag

SEQ ID NO: 4476 - protein, 123 aa, Artificial Sequence
  Description of Artificial Sequence: Synthetic polypeptide
EVQLVESGGGLVLPGGYLRLSCAASGFSFSNFWMSWVRQAPGKGLEWVASVRGDGSENHYVDSVKGRFTISRDNAKKSLHLHLNSLRAEDTAVYYCARARGRPYWGGDAFDIWGQGTMVTVSS

SEQ ID NO: 4477 - protein, 16 aa, Artificial Sequence
  Description of Artificial Sequence: Synthetic peptide
ARARGRPYWGGDAFDI

SEQ ID NO: 4478 - DNA, 322 bp, Artificial Sequence
  Description of Artificial Sequence: Synthetic polynucleotide
gaaatagtgatgacgcagtctccagccaccctgtctgtgtctccaggggaaagagccaccctctcctgcagggccagtcagagtgttagcagcaacttagcctggtaccagcagaaacctgggcaggctcccaggctcctcatctatgatgcatccaccagggccactggtatcccagccaggttcagtggcagtgggtctacgacagagttcactctcaccatcagcagcctgcagtctgaagattttgcagtttattactgtcagcagtataataactggcctcggacgttcggccaagggaccaaggtggacatcaaac

SEQ ID NO: 4479 - protein, 107 aa, Artificial Sequence
  Description of Artificial Sequence: Synthetic polypeptide
EIVMTQSPATLSVSPGERATLSCRASQSVSSNLAWYQQKPGQAPRLLIYDASTRATGIPARFSGSGSTTEFTLTISSLQSEDFAVYYCQQYNNWPRTFGQGTKVDIK

SEQ ID NO: 4480 - protein, 9 aa, Artificial Sequence
  Description of Artificial Sequence: Synthetic peptide
QQYNNWPRT

SEQ ID NO: 4481 - DNA, 381 bp, Artificial Sequence
  Description of Artificial Sequence: Synthetic polynucleotide
caggtgcagctggtgcagtctggggctgaggtgaggaagcctggggcctcagtgaaggtctcctgcaaggcttctggatacaccttcaccgactactatatccactgggtgcgactggcccctggacaagggcttgagtggatgggatggatcaaccctaccagtggtggcacaaattatgctcagaagtttgagggccgggtcaccatgaccagggagacgtccatcagcacagcctacatggagttcagcaggctgagattcgacgacacggccgtgtattattgtgcgaggagtatgatttttggagtggtcaggactcctacctactactacggcatggacgtctggggccaagggacgacggtcaccgtctcctca

SEQ ID NO: 4482 - protein, 127 aa, Artificial Sequence
  Description of Artificial Sequence: Synthetic polypeptide
QVQLVQSGAEVRKPGASVKVSCKASGYTFTDYYIHWVRLAPGQGLEWMGWINPTSGGTNYAQKFEGRVTMTRETSISTAYMEFSRLRFDDTAVYYCARSMIFGVVRTPTYYYGMDVWGQGTTVTVSS

SEQ ID NO: 4483 - protein, 20 aa, Artificial Sequence
  Description of Artificial Sequence: Synthetic peptide
ARSMIFGVVRTPTYYYGMDV

SEQ ID NO: 4484 - DNA, 322 bp, Artificial Sequence
  Description of Artificial Sequence: Synthetic polynucleotide
gaaatagtgatgacgcagtctccagccaccctgtctgtgtctccaggggaaagagccaccctctcctgcagggccagtcagagaattagcaccaacttagcctggtaccagcacaaacctgggcagcctccccggctcctcatttttggtgcgtccaccagggccactggtatcccagccaggttcagtggcagtgggtctgggacagagttcactctcaccatcagcagcctgcagtctgaagattttgcagtttattactgtcagcactattataactggctctggacgttcggccaagggaccaaggtggaaatcaaac

SEQ ID NO: 4485 - protein, 107 aa, Artificial Sequence
  Description of Artificial Sequence: Synthetic polypeptide
EIVMTQSPATLSVSPGERATLSCRASQRISTNLAWYQHKPGQPPRLLIFGASTRATGIPARFSGSGSGTEFTLTISSLQSEDFAVYYCQHYYNWLWTFGQGTKVEIK

SEQ ID NO: 4486 - protein, 9 aa, Artificial Sequence
  Description of Artificial Sequence: Synthetic peptide
QHYYNWLWT

SEQ ID NO: 4487 - DNA, 349 bp, Artificial Sequence
  Description of Artificial Sequence: Synthetic polynucleotide
caggtgcagctggtgcagtctggggctgaggtgaagaagcctgggtcctcggtgaaggtctcctgcaaggcttctggaggcagcttcaacaactatgctattaactgggtgcgacaggcccctggacacgggcttgagtggatgggaagggtcatcccactctttggtacgccaaactacgcacagaagttccagggcagactcatgattaccgcggacaaagccacgaccacagcctacatggacctgagcagcctgaaatctgaggacacggccgtttattactgtgcgagaggcacctggggctttgacgactggggccagggaaccctggtcaccgtctcctcag

SEQ ID NO: 4488 - protein, 116 aa, Artificial Sequence
  Description of Artificial Sequence: Synthetic polypeptide
QVQLVQSGAEVKKPGSSVKVSCKASGGSFNNYAINWVRQAPGHGLEWMGRVIPLFGTPNYAQKFQGRLMITADKATTTAYMDLSSLKSEDTAVYYCARGTWGFDDWGQGTLVTVSS

SEQ ID NO: 4489 - protein, 9 aa, Artificial Sequence
  Description of Artificial Sequence: Synthetic peptide
ARGTWGFDD

SEQ ID NO: 4490 - DNA, 322 bp, Artificial Sequence
  Description of Artificial Sequence: Synthetic polynucleotide
gaaattgtgttgacgcagtctccaggcaccctgtctgtgtctctcggggaaagagccaccctctcctgcagggccagtcagagtgttaacagcgactacttagcctggtaccagcagaaacgtggccaggctcccaggctcctcatctatggtgcatccaccagggccactgccatcccagacaggttcagtggcagtgggtctgggacagacttcactctaaccatcagcagactggagcctgaagattctgcagtgtattactgtcaccacttaggtagttccgacagtttcggccctgggaccaaagtggatatcaaac

SEQ ID NO: 4491 - protein, 107 aa, Artificial Sequence
  Description of Artificial Sequence: Synthetic polypeptide
EIVLTQSPGTLSVSLGERATLSCRASQSVNSDYLAWYQQKRGQAPRLLIYGASTRATAIPDRFSGSGSGTDFTLTISRLEPEDSAVYYCHHLGSSDSFGPGTKVDIK

SEQ ID NO: 4492 - protein, 8 aa, Artificial Sequence
  Description of Artificial Sequence: Synthetic peptide
HHLGSSDS

SEQ ID NO: 4493 - DNA, 364 bp, Artificial Sequence
  Description of Artificial Sequence: Synthetic polynucleotide
caggttcagctggtgcagtctggagctgaggtgaagaagcctggggcctcagtgagggtctcctgtaagacttctggttacaagtttaccttctatggtatcacctgggtgcgacaggcccctggacaagggcttgagtggctgggttggatcagcggtaacaatggtaacacaaattatgcacagaaactccagggcagagtcaccatgaccacagacacatccacgagcacagcctacatggaactgaggagcctgagatctgacgacacggccgtatattactgtgcgagagggtggggtaccagcagctggcaccctttagactactggggccagggagccctggtcaccgtctcctcag

SEQ ID NO: 4494 - protein, 121 aa, Artificial Sequence
  Description of Artificial Sequence: Synthetic polypeptide
QVQLVQSGAEVKKPGASVRVSCKTSGYKFTFYGITWVRQAPGQGLEWLGWISGNNGNTNYAQKLQGRVTMTTDTSTSTAYMELRSLRSDDTAVYYCARGWGTSSWHPLDYWGQGALVTVSS

SEQ ID NO: 4495 - protein, 14 aa, Artificial Sequence
  Description of Artificial Sequence: Synthetic peptide
ARGWGTSSWHPLDY

SEQ ID NO: 4496 - DNA, 322 bp, Artificial Sequence
  Description of Artificial Sequence: Synthetic polynucleotide
gacatccagttgacccagtctccatccttcctgtctgcatctgtaggagacagagtcaccatcacttgtcgggccagtcaggacattaacaattatttagcctggtatcagcaaaaaccagggaaagcccctaagctcctgatctttgctgcatccactgagcaaagtggggtcccatcaaggttcagcggcagtggatctgggacagaattcactctcacaatcagcagcctgcagcctgaagattttgcagcttattactgtcaacagattcatagttacccgatcaccttcggccaggggacacgactggagattaaac

SEQ ID NO: 4497 - protein, 107 aa, Artificial Sequence
  Description of Artificial Sequence: Synthetic polypeptide
DIQLTQSPSFLSASVGDRVTITCRASQDINNYLAWYQQKPGKAPKLLIFAASTEQSGVPSRFSGSGSGTEFTLTISSLQPEDFAAYYCQQIHSYPITFGQGTRLEIK

SEQ ID NO: 4498 - protein, 9 aa, Artificial Sequence
  Description of Artificial Sequence: Synthetic peptide
QQIHSYPIT

SEQ ID NO: 4499 - DNA, 379 bp, Artificial Sequence
  Description of Artificial Sequence: Synthetic polynucleotide
caggtgcagctgcaggagtcgggcccaggactggtgaagccttcacagaccctgtccctcacctgcactgtctctggtggctccatcagcagtgataattactattggagttggatccgccagcccccagggaagggcctggagtggattgggtacatctattacagcgggaccacctactccaacccgtccctcaagagtcgacttaccatgtccgtagacccgtccaagaaccagttctccctgaagctgagctctgtgactgccgcagacacggccatttattactgtgccacattctcgtacgatttttggagtggtttttattcaaattactttgactactggggccagggaaccctggtcaccgtctcctcag

SEQ ID NO: 4500 - protein, 126 aa, Artificial Sequence
  Description of Artificial Sequence: Synthetic polypeptide
QVQLQESGPGLVKPSQTLSLTCTVSGGSISSDNYYWSWIRQPPGKGLEWIGYIYYSGTTYSNPSLKSRLTMSVDPSKNQFSLKLSSVTAADTAIYYCATFSYDFWSGFYSNYFDYWGQGTLVTVSS

SEQ ID NO: 4501 - protein, 18 aa, Artificial Sequence
  Description of Artificial Sequence: Synthetic peptide
ATFSYDFWSGFYSNYFDY

SEQ ID NO: 4502 - DNA, 328 bp, Artificial Sequence
  Description of Artificial Sequence: Synthetic polynucleotide
gaaattgtgttgacgcagtctccaggcaccctgtctttgtctccaggggaaagagccaccctctcctgcagggccagtcagagtgttagcaataactacttaacttggtaccagcagaaacctggccaggctcccagggtcctcatctatggtgcatccagcagggccactggcaccccagacaggttcagtggcagtgggtctgcgacagacttcactctcaccatcagcagactggagcctgaagattttgcagtgtattactgtcagcactatgacagctcacgtcggatcaccttcggccaagggacacgactggagattaaac

SEQ ID NO: 4503 - protein, 109 aa, Artificial Sequence
  Description of Artificial Sequence: Synthetic polypeptide
EIVLTQSPGTLSLSPGERATLSCRASQSVSNNYLTWYQQKPGQAPRVLIYGASSRATGTPDRFSGSGSATDFTLTISRLEPEDFAVYYCQHYDSSRRITFGQGTRLEIK

SEQ ID NO: 4504 - protein, 10 aa, Artificial Sequence
  Description of Artificial Sequence: Synthetic peptide
QHYDSSRRIT

SEQ ID NO: 4505 - DNA, 355 bp, Artificial Sequence
  Description of Artificial Sequence: Synthetic polynucleotide
caggtccagctggtgcagtctggggctgaggtgaagaagcctgggtcctcggtgaaggtctcctgcaaggcttctggaggcaccttcagcaactatgctatcagctgggtgcgacaggcccctggacacgggcttgagtggatgggagggatcatccctttatttggtgcagcaaactacgcacagaagttccagggcagagtcacgattaccgcggacgaatacacgagcacagcctacatggacctgagcagcctgagatctgaggacacggccgtgtattactgtgcgcgtgacggggggcaaggaagtctcgattactggggccagggaaccctggtcaccgtctcttcag

SEQ ID NO: 4506 - protein, 118 aa, Artificial Sequence
  Description of Artificial Sequence: Synthetic polypeptide
QVQLVQSGAEVKKPGSSVKVSCKASGGTFSNYAISWVRQAPGHGLEWMGGIIPLFGAANYAQKFQGRVTITADEYTSTAYMDLSSLRSEDTAVYYCARDGGQGSLDYWGQGTLVTVSS

SEQ ID NO: 4507 - protein, 11 aa, Artificial Sequence
  Description of Artificial Sequence: Synthetic peptide
ARDGGQGSLDY

SEQ ID NO: 4508 - DNA, 337 bp, Artificial Sequence
  Description of Artificial Sequence: Synthetic polynucleotide
gatattgtgatgactcagtctccactctccctgcccgtcacccctggagagccggcctccatctcctgcaggtctagtcagagcctcctgcatcgtagtggatacatctatttggattggtacctgcagaagccagggcagtctccacagctcctgatctatttgggttctaatcgggcctccggggtccctgacaggttcagtggcagtggatcaggcacatattttacactgaaaatcagcagagtggaggctgaggatgttggggtttattactgcatgcaagctctacaaactcccaggacgttcggccaagggaccaaggtggaaatcaaac

SEQ ID NO: 4509 - protein, 112 aa, Artificial Sequence
  Description of Artificial Sequence: Synthetic polypeptide
DIVMTQSPLSLPVTPGEPASISCRSSQSLLHRSGYIYLDWYLQKPGQSPQLLIYLGSNRASGVPDRFSGSGSGTYFTLKISRVEAEDVGVYYCMQALQTPRTFGQGTKVEIK

SEQ ID NO: 4510 - protein, 9 aa, Artificial Sequence
  Description of Artificial Sequence: Synthetic peptide
MQALQTPRT

SEQ ID NO: 4511 - DNA, 378 bp, Artificial Sequence
  Description of Artificial Sequence: Synthetic polynucleotide
gaggtgcagctgttggagtctgggggaggcttggtacagcctggggggtccctgagactctcctgtgcagcctctggattcacttttagcagctacgccatgacttgggtccgccaggctccagggcaggggctggagtgggtctcatctattagcagtagtggcagtagcgcatcctactcagcctccgtgcagggccggttcaccatctcccgagacaattccaagaacacgctgtatgtgcaaatgaatagcctgagagacgaggacacggccgtctattactgtgcgaaagatggacttaaaggatcttcctattactactactattccggtatggacgtctggggccaagggaccacggtcaccgtctcctca

SEQ ID NO: 4512 - protein, 126 aa, Artificial Sequence
  Description of Artificial Sequence: Synthetic polypeptide
EVQLLESGGGLVQPGGSLRLSCAASGFTFSSYAMTWVRQAPGQGLEWVSSISSSGSSASYSASVQGRFTISRDNSKNTLYVQMNSLRDEDTAVYYCAKDGLKGSSYYYYYSGMDVWGQGTTVTVSS

SEQ ID NO: 4513 - protein, 19 aa, Artificial Sequence
  Description of Artificial Sequence: Synthetic peptide
AKDGLKGSSYYYYYSGMDV

SEQ ID NO: 4514 - DNA, 337 bp, Artificial Sequence
  Description of Artificial Sequence: Synthetic polynucleotide
gatattgtgatgactcagtctccactctccctgcccgtcacccctggagagccggcctccatctcctgcaggtctagtcagagcctcctgcatagtaatggatacaactatttggattggtacctgcagaagccagggcagtctccacagctcctgatctatttgggttctaatcgggcctccggggtccctgacaggttcagtggcagtggatcaggcacagattttacactgaaaatcagcagagtggaggctgaggatgttggggtttattactgcatgcaagctctacaaactccgtacacttttggccaggggaccaagctggagatcaaac

SEQ ID NO: 4515 - protein, 112 aa, Artificial Sequence
  Description of Artificial Sequence: Synthetic polypeptide
DIVMTQSPLSLPVTPGEPASISCRSSQSLLHSNGYNYLDWYLQKPGQSPQLLIYLGSNRASGVPDRFSGSGSGTDFTLKISRVEAEDVGVYYCMQALQTPYTFGQGTKLEIK

SEQ ID NO: 4516 - protein, 9 aa, Artificial Sequence
  Description of Artificial Sequence: Synthetic peptide
MQALQTPYT

SEQ ID NO: 4517 - DNA, 370 bp, Artificial Sequence
  Description of Artificial Sequence: Synthetic polynucleotide
gaggtgcagctggtggagtctgggggaggcttggtccggcctgggggatctgtaagactctcctgtgcagcctctggattcacctttgacgacttttggatgagctgggtccgccaggctccagggaagggcctggagtgggtggccaatataaaaggagatggatctgagagtcattacgtggactctgtgaagggccggttcaccatctccagagacaacggcaagacgtcactgcatctgcacatgaacagcctgagcgccgccgacacggccgtctactactgtgcgagagcccgcggtaggccctactggggtggtgatgctttcgacatctggggccaagggaccatggtcaccgtctcttcag

SEQ ID NO: 4518 - protein, 123 aa, Artificial Sequence
  Description of Artificial Sequence: Synthetic polypeptide
EVQLVESGGGLVRPGGSVRLSCAASGFTFDDFWMSWVRQAPGKGLEWVANIKGDGSESHYVDSVKGRFTISRDNGKTSLHLHMNSLSAADTAVYYCARARGRPYWGGDAFDIWGQGTMVTVSS

SEQ ID NO: 4519 - protein, 16 aa, Artificial Sequence
  Description of Artificial Sequence: Synthetic peptide
ARARGRPYWGGDAFDI

SEQ ID NO: 4520 - DNA, 322 bp, Artificial Sequence
  Description of Artificial Sequence: Synthetic polynucleotide
gaaatagtgatgacgcagtctccagccaccctgtctgtgtctccaggggaaagcgccaccctctcctgcgaggccagtcagactgttaacagcaacctagcctggtaccaacagaaacctgggcaggctcccaggctcctcatctatgatgcaaccatcagggccactggaatcccagccaggttcagtggcagtgggttaacgacagacttcactctcaccatcagtggcctgcagtccgaagactttgcagtttattactgtcagcagtataataattggcctcggacgttcggccaagggaccaaggtagaaatcaaac

SEQ ID NO: 4521 - protein, 107 aa, Artificial Sequence; identical to SEQ ID NO: 4359
  Description of Artificial Sequence: Synthetic polypeptide

SEQ ID NO: 4522 - protein, 9 aa, Artificial Sequence
  Description of Artificial Sequence: Synthetic peptide
QQYNNWPRT

SEQ ID NO: 4523 - DNA, 370 bp, Artificial Sequence
  Description of Artificial Sequence: Synthetic polynucleotide
gaggtgcagctggtggagtctgggggacgcttggtccggccgggggggtccctgagaatctcctgtgcagcctccggttttagtattggtaaaaattggatgagttgggtccgccaggctccaggaaaggggctggagtgggtggccaacataaaagaagatggaagtgagagacgctatgtggactctgtggagggccgattcaccgtctcgagagacaacgccaagaacgcagtatatctacaaatgaacagcctgagagtcgaggacacggccgtctattactgtgcgcgggcccgcggtagaacctactggggaggtgatgcctttgatctctggggccgaggggcactggttaccgtctcttcag

SEQ ID NO: 4524 - protein, 123 aa, Artificial Sequence
  Description of Artificial Sequence: Synthetic polypeptide
EVQLVESGGRLVRPGGSLRISCAASGFSIGKNWMSWVRQAPGKGLEWVANIKEDGSERRYVDSVEGRFTVSRDNAKNAVYLQMNSLRVEDTAVYYCARARGRTYWGGDAFDLWGRGALVTVSS

SEQ ID NO: 4525 - protein, 16 aa, Artificial Sequence
  Description of Artificial Sequence: Synthetic peptide
ARARGRTYWGGDAFDL

SEQ ID NO: 4526 - DNA, 322 bp, Artificial Sequence
  Description of Artificial Sequence: Synthetic polynucleotide
gaaatagtgatgacgcagtctccagccaccctgtctgtgtctccaggagaaagagtcaccctctcgtgcggggccagtcagccggttaacagcaacttaggttggtaccagcagaaacctggacaggctcccagactcctcatttatgatgcatccattagggccactggcatccccgccaggttcagtggcactggatctacgacagagttcactctcaccatcagcagcctgcagtctgaagattttgcagtttattactgtcagcagtattataactggcctcggacgttcggccaagggaccaaggtggagatcaaac

SEQ ID NO: 4527 - protein, 107 aa, Artificial Sequence
  Description of Artificial Sequence: Synthetic polypeptide
EIVMTQSPATLSVSPGERVTLSCGASQPVNSNLGWYQQKPGQAPRLLIYDASIRATGIPARFSGTGSTTEFTLTISSLQSEDFAVYYCQQYYNWPRTFGQGTKVEIK

SEQ ID NO: 4528 - protein, 9 aa, Artificial Sequence
  Description of Artificial Sequence: Synthetic peptide
QQYYNWPRT

SEQ ID NO: 4529 - DNA, 362 bp, Artificial Sequence
  Description of Artificial Sequence: Synthetic polynucleotide
caggtgcagctggtgcagtctggggctgaggtgaagaagcctggggcctctgtgaaggtctcctgcaaggcctctggatacagattcagcgactactacatccactgggtgcgacaggcccctggacaagggcttgagtggatgggatggatcaaccctacaagtggagacagaaattatgcaccgagctttcagggccgggtcaccatgaccagggagacgtccatcaccacagcctacatggagttcagcagactgagatctgacgacacggccatatattattgtgcgaggagtatgatctttggagtggttactactcctacctactactacggtatggacgtctggggccaagggac

SEQ ID NO: 4530 - protein, 120 aa, Artificial Sequence
  Description of Artificial Sequence: Synthetic polypeptide
QVQLVQSGAEVKKPGASVKVSCKASGYRFSDYYIHWVRQAPGQGLEWMGWINPTSGDRNYAPSFQGRVTMTRETSITTAYMEFSRLRSDDTAIYYCARSMIFGVVTTPTYYYGMDVWGQG

SEQ ID NO: 4531 - protein, 20 aa, Artificial Sequence
  Description of Artificial Sequence: Synthetic peptide
ARSMIFGVVTTPTYYYGMDV

SEQ ID NO: 4532 - DNA, 322 bp, Artificial Sequence
  Description of Artificial Sequence: Synthetic polynucleotide
gaaatagtgatgacgcagtctccagccaccctgtctgtgtctccaggggaaagagccaccctctcctgcagggccagtcagagtgttagcaccaacttagcctggtaccagcacaaacctgggcaggctccccggctcctcatttttggtgcatccaccagggccactggtatcccagccaggttcagtggcagtgggtctgggacagagttcactctcaccatcagcagcctgcagtctgaggattttgcagtttattactgtcagcactattataactggctctggacgttcggcccagggaccaaggtggaaatcaaac

SEQ ID NO: 4533 - protein, 107 aa, Artificial Sequence
  Description of Artificial Sequence: Synthetic polypeptide
EIVMTQSPATLSVSPGERATLSCRASQSVSTNLAWYQHKPGQAPRLLIFGASTRATGIPARFSGSGSGTEFTLTISSLQSEDFAVYYCQHYYNWLWTFGPGTKVEIK

SEQ ID NO: 4534 - protein, 9 aa, Artificial Sequence
  Description of Artificial Sequence: Synthetic peptide
QHYYNWLWT

SEQ ID NO: 4535 - DNA, 358 bp, Artificial Sequence
  Description of Artificial Sequence: Synthetic polynucleotide
caggtgcagctggtggagtctgggggaggcgtggtccagcctgggaagtccctgagactctcctgtgaagtctctggattcaccttcagtcactatactatgcactgggtccgccaggctccaggcaaggggctggagtgggtggcagttatatcatatgatggaaactataaatactccgcagactccgtgaagggccgattcaccatctccagagacaattccaagaacacgctgtttctgcaaatgaacagcctgagagcagaggacacggctatgtattactgtgcgagaggttcaggttcaacaggtggctggaattactggggccagggaaccctggtcaccgtctcctcag

SEQ ID NO: 4536 - protein, 119 aa, Artificial Sequence
  Description of Artificial Sequence: Synthetic polypeptide
QVQLVESGGGVVQPGKSLRLSCEVSGFTFSHYTMHWVRQAPGKGLEWVAVISYDGNYKYSADSVKGRFTISRDNSKNTLFLQMNSLRAEDTAMYYCARGSGSTGGWNYWGQGTLVTVSS

SEQ ID NO: 4537 - protein, 12 aa, Artificial Sequence
  Description of Artificial Sequence: Synthetic peptide
ARGSGSTGGWNY

SEQ ID NO: 4538 - DNA, 325 bp, Artificial Sequence
  Description of Artificial Sequence: Synthetic polynucleotide
gacatccagatgacccagtctccatcctccctgtctgcatctgtaggagacagagtcaccatcacttgccaggcgagtcaggacattagcaactatttaaattggtatcagcagaaaccagggaaagcccctaagctcctgatctacgatgcatccaatttggaaacaggggtcccatcaaggttcagtggaagtggatctggggcagattttactttcaccatcagcagcctgcagcctgaagatattgcaacatattactgtcaacagtatgataagctccctccgtacacttttggccaggggaccaagctggagatcaaac

SEQ ID NO: 4539 - protein, 108 aa, Artificial Sequence
  Description of Artificial Sequence: Synthetic polypeptide
DIQMTQSPSSLSASVGDRVTITCQASQDISNYLNWYQQKPGKAPKLLIYDASNLETGVPSRFSGSGSGADFTFTISSLQPEDIATYYCQQYDKLPPYTFGQGTKLEIK

SEQ ID NO: 4540 - protein, 10 aa, Artificial Sequence
  Description of Artificial Sequence: Synthetic peptide
QQYDKLPPYT

SEQ ID NO: 4541 - DNA, 379 bp, Artificial Sequence
  Description of Artificial Sequence: Synthetic polynucleotide
gaggtgcagctgttggagtctgggggaggcttggtacagcctggggagtccctgagactctcttgtgtagcctctggattcagcttcaacgactatgccatgaactgggtccgccaggctccagggaaggggctggagtgggtctcaattattagtgataatggtgacgccacagactacgcagactccgtgaagggccggttcaccatctccagagacaattccaagaacaccctatatctgcacatgaacagcctgagagtcgaagacacggccgtatatttctgtgcgaaatggggattacggcgtcttggactttccggattgggcatcccacttgactactggggccagggagccctggtcatcgtctcctcag

SEQ ID NO: 4542 - protein, 126 aa, Artificial Sequence
  Description of Artificial Sequence: Synthetic polypeptide
EVQLLESGGGLVQPGESLRLSCVASGFSFNDYAMNWVRQAPGKGLEWVSIISDNGDATDYADSVKGRFTISRDNSKNTLYLHMNSLRVEDTAVYFCAKWGLRRLGLSGLGIPLDYWGQGALVIVSS

SEQ ID NO: 4543 - protein, 19 aa, Artificial Sequence
  Description of Artificial Sequence: Synthetic peptide
AKWGLRRLGLSGLGIPLDY

SEQ ID NO: 4544 - DNA, 325 bp, Artificial Sequence
  Description of Artificial Sequence: Synthetic polynucleotide
gacatccagatgacccagtctccatcctccctgtctgcatctgtaggagacagggtcaccgtcacttgccggacaagtcaggtcattggcatgtatttaaattggtatcagcacaaaccagggaaagcccctaaactcattatctatgctgcatccaatttgcatactggggtcccatcaaggttcagtggcggtggatctgggacagatttcagtctcaccatcagcagtctacaacctgaagattttgccacttattactgtcaacagagttacagtgccccctcgatcaccttcggccaagggacacgactggaaattaaac

SEQ ID NO: 4545 - protein, 108 aa, Artificial Sequence
  Description of Artificial Sequence: Synthetic polypeptide
DIQMTQSPSSLSASVGDRVTVTCRTSQVIGMYLNWYQHKPGKAPKLIIYAASNLHTGVPSRFSGGGSGTDFSLTISSLQPEDFATYYCQQSYSAPSITFGQGTRLEIK

SEQ ID NO: 4546 - protein, 10 aa, Artificial Sequence
  Description of Artificial Sequence: Synthetic peptide
QQSYSAPSIT

SEQ ID NO: 4547 - DNA, 370 bp, Artificial Sequence
  Description of Artificial Sequence: Synthetic polynucleotide
caggtgcagctgcaggagtcgggcccaggactggtgaagccttcggagaccctgtccctcacctgcactgtctctggtgtctccatcaatacttactgctggagctggatccggcagcccccagggaagggcctggagtggattggctatatatactacagcgggaacaccaattacaacccctccctgaagagtcgaggcacgatatcagtagacacgtccaagaagcagatcttcctgaggttgagctctgtgaccgctgcggacacgggcgtttattactgtgcgagggccaatatttccccgggggtggccttcgactggtacttcgatctctggggccgtggcaccctggtcactgtctcttcag

SEQ ID NO: 4548 - protein, 123 aa, Artificial Sequence
  Description of Artificial Sequence: Synthetic polypeptide
QVQLQESGPGLVKPSETLSLTCTVSGVSINTYCWSWIRQPPGKGLEWIGYIYYSGNTNYNPSLKSRGTISVDTSKKQIFLRLSSVTAADTGVYYCARANISPGVAFDWYFDLWGRGTLVTVSS

SEQ ID NO: 4549 - protein, 17 aa, Artificial Sequence
  Description of Artificial Sequence: Synthetic peptide
ARANISPGVAFDWYFDL

SEQ ID NO: 4550 - DNA, 328 bp, Artificial Sequence
  Description of Artificial Sequence: Synthetic polynucleotide
cagtctgtgctgactcagccgccctcagtgtctgcgaccccaggacagagggtcaccatctcctgctctggaagcagctccaacattgggaataattatgtatcctggtaccagcaactcccaggaacagcccccaaactcctcatttttgacaataataagcgaccctcagggattcctgaccgattctctggctccaagtctggcacgtcagccaccctgggcatctccggactccagactggggacgaggccgattattactgcggaacatgggataacaccctgaatgctgtcttcggaactgggaccaaggtcaccgtcctag

SEQ ID NO: 4551 - protein, 109 aa, Artificial Sequence
  Description of Artificial Sequence: Synthetic polypeptide
QSVLTQPPSVSATPGQRVTISCSGSSSNIGNNYVSWYQQLPGTAPKLLIFDNNKRPSGIPDRFSGSKSGTSATLGISGLQTGDEADYYCGTWDNTLNAVFGTGTKVTVL

SEQ ID NO: 4552 - protein, 10 aa, Artificial Sequence
  Description of Artificial Sequence: Synthetic peptide
GTWDNTLNAV

SEQ ID NO: 4553 - DNA, 376 bp, Artificial Sequence
  Description of Artificial Sequence: Synthetic polynucleotide
caggtgcagctggtgcagtctggggctgaggtgacgaagcctggggcctcagtgaaggtctcctgcaaggcttctggatacaccttcaccacttatcatatcaactgggtgcgacaggccactggacaggggcttgagtggatgggatggatgaaccctaaaagtggtgacacaggctatgcacagaagttccagggcagagtcaccatgaccagggacacctccataagtacagcctacatggagttgagtagcctgagatctgaggacacggccgtctattactgtgcgagagatggcgatttttggagtggttattatttatatagttggctcgacccctggggccagggaaccctggtcaccgtctcctcag

SEQ ID NO: 4554 - protein, 125 aa, Artificial Sequence
  Description of Artificial Sequence: Synthetic polypeptide
QVQLVQSGAEVTKPGASVKVSCKASGYTFTTYHINWVRQATGQGLEWMGWMNPKSGDTGYAQKFQGRVTMTRDTSISTAYMELSSLRSEDTAVYYCARDGDFWSGYYLYSWLDPWGQGTLVTVSS

SEQ ID NO: 4555 - protein, 18 aa, Artificial Sequence
  Description of Artificial Sequence: Synthetic peptide
ARDGDFWSGYYLYSWLDP

SEQ ID NO: 4556 - DNA, 330 bp, Artificial Sequence
  Description of Artificial Sequence: Synthetic polynucleotide
cagtctgtgctgactcagccgccctcagtgtctgcggccccaggacagaaggtcaccatctcctgctctggaagcggctccaacgttgggaatagttatgtttcctggtaccagcacctcccaggaacagcccccaaactcctcatttatgacaatgataagcgaccctcagggattcctgaccgattctctggctccaagtctggcacgtcagccatcctgggcatcaccggactccagactggggacgaggccgattatttctgcggaacctgggatagcagcctgggtactgtggttttcggcggagggaccaggctgaccgtccta

SEQ ID NO: 4557 - protein, 110 aa, Artificial Sequence
  Description of Artificial Sequence: Synthetic polypeptide
QSVLTQPPSVSAAPGQKVTISCSGSGSNVGNSYVSWYQHLPGTAPKLLIYDNDKRPSGIPDRFSGSKSGTSAILGITGLQTGDEADYFCGTWDSSLGTVVFGGGTRLTVL

SEQ ID NO: 4558 - protein, 11 aa, Artificial Sequence
  Description of Artificial Sequence: Synthetic peptide
GTWDSSLGTVV

SEQ ID NO: 4559 - DNA, 376 bp, Artificial Sequence
  Description of Artificial Sequence: Synthetic polynucleotide
caggtgcagctggtgcagtctggggctgaggtgacgaagcctggggcctcagtgaaggtctcctgtaaggcttctggatacaccttcaccacttatcatatcaactgggtgcgacaggccactggacaggggcttgagtggctggggtggatgaaccctaaaagtggcgacacaggctatgcacagaagttccagggcagagtcaccatgaccagggacagctccataaatacggcctacatggaactgactgccctgagacctgaggacacggccgtgtattactgtgcgagagatggcgatttttggagtggttattatttatatagttggctcgacccctggggccagggaaccctggtcaccgtctcctcag

SEQ ID NO: 4560 - protein, 125 aa, Artificial Sequence
  Description of Artificial Sequence: Synthetic polypeptide
QVQLVQSGAEVTKPGASVKVSCKASGYTFTTYHINWVRQATGQGLEWLGWMNPKSGDTGYAQKFQGRVTMTRDSSINTAYMELTALRPEDTAVYYCARDGDFWSGYYLYSWLDPWGQGTLVTVSS

SEQ ID NO: 4561 - protein, 18 aa, Artificial Sequence
  Description of Artificial Sequence: Synthetic peptide
ARDGDFWSGYYLYSWLDP

SEQ ID NO: 4562 - DNA, 330 bp, Artificial Sequence
  Description of Artificial Sequence: Synthetic polynucleotide
cagtctgtgctgactcagccgccctcagtgtctgcggccccaggacagaaggtcaccatctcctgtgctggaagcggctccaacattgggaatagttatgtttcctggtaccagcacctcccaggaacagcccccaaactcctcatatatgacactgataagcgaccctcagggattcctgcccgattctctgcctccaagtctggcacgtcagccatcctgggcatcaccggactccagactggggacgaggccgattatttctgcggaacctgggatagcagcctgggtgctgtggttttcggcggagggaccaggctgaccgtccta

SEQ ID NO: 4563 - protein, 110 aa, Artificial Sequence
  Description of Artificial Sequence: Synthetic polypeptide
QSVLTQPPSVSAAPGQKVTISCAGSGSNIGNSYVSWYQHLPGTAPKLLIYDTDKRPSGIPARFSASKSGTSAILGITGLQTGDEADYFCGTWDSSLGAVVFGGGTRLTVL

SEQ ID NO: 4564 - protein, 11 aa, Artificial Sequence
  Description of Artificial Sequence: Synthetic peptide
GTWDSSLGAVV

SEQ ID NO: 4565 - DNA, 385 bp, Artificial Sequence; identical to SEQ ID NO: 229
  Description of Artificial Sequence: Synthetic polynucleotide

SEQ ID NO: 4566 - protein, 128 aa, Artificial Sequence; identical to SEQ ID NO: 111
  Description of Artificial Sequence: Synthetic polypeptide

SEQ ID NO: 4567 - protein, 21 aa, Artificial Sequence
  Description of Artificial Sequence: Synthetic peptide
ARDFSQGNYWSGFLNYNWFDP

SEQ ID NO: 4568 - DNA, 331 bp, Artificial Sequence
  Description of Artificial Sequence: Synthetic polynucleotide
cagtctgtgctgactcagcctgcctccgtgtctgggtctcctggacagtcgatcaccatctcctgcactggaaccaacagtgacgttggtggttatagttatgtctcctggtaccaacaacacccaggcaaagcccccaaactcatgatttatgaggtcagtaatcggccctcaggggtccctgatcgcttctctggctccaagtctggcaacacggcctccctgaccatctctgggctccgggctgaggacgaggctgattattactgcagctcatacacaagcagcaccactagggtcttcggcggagggaccaagctgaccgtcctag

SEQ ID NO: 4569 - protein, 110 aa, Artificial Sequence
  Description of Artificial Sequence: Synthetic polypeptide
QSVLTQPASVSGSPGQSITISCTGTNSDVGGYSYVSWYQQHPGKAPKLMIYEVSNRPSGVPDRFSGSKSGNTASLTISGLRAEDEADYYCSSYTSSTTRVFGGGTKLTVL

SEQ ID NO: 4570 - protein, 10 aa, Artificial Sequence
  Description of Artificial Sequence: Synthetic peptide
SSYTSSTTRV

SEQ ID NO: 4571 - DNA, 372 bp, Artificial Sequence
  Description of Artificial Sequence: Synthetic polynucleotide
caggttcagctggtgcagtctggagctgaggtgaagaagcctggggcctcagtgaaggtctcctgcaagacttcgggttacacctatagggactatggtattggttgggtgcgacaggcccctggacaagggcttgagtggatgggatggatcagcgctgacaaaggtagcacaaagtattcacagaatctccagggcagagtcaccatgaccgctgacacatccacgaatacagtgtacatggagttgaggagcctcagatctgacgacacggccgtgtatttctgtgcgagaattttctaccagctgcttttcgactactcctatggcttcgacgtctggggccaagggaccacggtcaccgtctcgtca

SEQ ID NO: 4572 - protein, 124 aa, Artificial Sequence
  Description of Artificial Sequence: Synthetic polypeptide
QVQLVQSGAEVKKPGASVKVSCKTSGYTYRDYGIGWVRQAPGQGLEWMGWISADKGSTKYSQNLQGRVTMTADTSTNTVYMELRSLRSDDTAVYFCARIFYQLLFDYSYGFDVWGQGTTVTVSS

SEQ ID NO: 4573 - protein, 17 aa, Artificial Sequence
  Description of Artificial Sequence: Synthetic peptide
ARIFYQLLFDYSYGFDV

SEQ ID NO: 4574 - DNA, 334 bp, Artificial Sequence
  Description of Artificial Sequence: Synthetic polynucleotide
aattttatgctgactcagcctcactctgtgtcggagtctccggggaagacggtaaccatctcctgcacccgcagcagtggcagcattgcccgcaactttgtgcagtggtaccaacagcgcccgggcagtgcccccaccactgtgatgtatgagggtaaccagagaccctctggggtccctgatcggttctctggctccatcgacagctcctccaactctgcctccctcatcatctctggactgaagactgaggacgaggctgactactactgtcagtcttttgatatcaagtcgggggtggttttcggcggagggaccaagctgaccgtcctag

SEQ ID NO: 4575 - protein, 111 aa, Artificial Sequence
  Description of Artificial Sequence: Synthetic polypeptide
NFMLTQPHSVSESPGKTVTISCTRSSGSIARNFVQWYQQRPGSAPTTVMYEGNQRPSGVPDRFSGSIDSSSNSASLIISGLKTEDEADYYCQSFDIKSGVVFGGGTKLTVL

SEQ ID NO: 4576 - protein, 10 aa, Artificial Sequence
  Description of Artificial Sequence: Synthetic peptide
QSFDIKSGVV

SEQ ID NO: 4577 - DNA, 385 bp, Artificial Sequence
  Description of Artificial Sequence: Synthetic polynucleotide
caggtgcagctggtggagtctgggggagggttggtcaagcctggagggtccctgagactctcctgtgcagcctccggattcaccttcagtgactaccagatgaactggatccgccaggctccagggaaggggctggagtggatttcatccattagtggtcgtggtagcaccatatactacgcagactctgtgaagggccgattcaccatgtccagggacaacgccaagaagtcgctgtatctgcaaatgaacagcctgagagccgaggacacggccgtgtattactgtgcgagagatttcacacagggaaatttttggagtggtttcctcaattacaattggttcgacccctggggccagggaaccctggtcaccgtctcctcag

SEQ ID NO: 4578 - protein, 128 aa, Artificial Sequence
  Description of Artificial Sequence: Synthetic polypeptide
QVQLVESGGGLVKPGGSLRLSCAASGFTFSDYQMNWIRQAPGKGLEWISSISGRGSTIYYADSVKGRFTMSRDNAKKSLYLQMNSLRAEDTAVYYCARDFTQGNFWSGFLNYNWFDPWGQGTLVTVSS

SEQ ID NO: 4579 - protein, 21 aa, Artificial Sequence
  Description of Artificial Sequence: Synthetic peptide
ARDFTQGNFWSGFLNYNWFDP

SEQ ID NO: 4580 - DNA, 331 bp, Artificial Sequence
  Description of Artificial Sequence: Synthetic polynucleotide
cagtctgtgctgactcagcctgcctccgtgtctgggtctcctggacagtcgatcaccatctcctgcactggaaccagcagtgacgttggtggttatagctatgtctcctggtaccaacagcacccaggcaaagcccccaaattgatgatttatgaggtcagcaatcggccctcaggggtccctgatcgcttctctggctccaagtctggcaacacggcctccctgaccatctctgggctccaggctgaggacgaggctgattattactgcagctcatatacaatcagcaacactagggtattcggcggagggaccaaggtgaccgtcctag

SEQ ID NO: 4581 - protein, 110 aa, Artificial Sequence
  Description of Artificial Sequence: Synthetic polypeptide
QSVLTQPASVSGSPGQSITISCTGTSSDVGGYSYVSWYQQHPGKAPKLMIYEVSNRPSGVPDRFSGSKSGNTASLTISGLQAEDEADYYCSSYTISNTRVFGGGTKVTVL

SEQ ID NO: 4582 - protein, 10 aa, Artificial Sequence
  Description of Artificial Sequence: Synthetic peptide
SSYTISNTRV

SEQ ID NO: 4583 - DNA, 376 bp, Artificial Sequence
  Description of Artificial Sequence: Synthetic polynucleotide
caggtgcagctggtgcagtctggggctgaggtgacgaagcctggggcctcagtgaaggtctcctgcaaggcttctggatacaccttcaccacttatcatatcaactgggtgcgacaggcccctggacaggggcttgagtggatgggatgggtgaaccctaagagtggtgacacaggctatgcacagaagttccagggcagagtcaccatgaccagggacacctccataactacagcctacatggagttgagtagcctgagatctgaggacacggccgtctattattgtgcgagagatggcgatttttggagtggttattatctacatagttggctcgacccctggggccagggaaccctggtcaccgtctcctcag

SEQ ID NO: 4584 - protein, 125 aa, Artificial Sequence
  Description of Artificial Sequence: Synthetic polypeptide
QVQLVQSGAEVTKPGASVKVSCKASGYTFTTYHINWVRQAPGQGLEWMGWVNPKSGDTGYAQKFQGRVTMTRDTSITTAYMELSSLRSEDTAVYYCARDGDFWSGYYLHSWLDPWGQGTLVTVSS

SEQ ID NO: 4585 - protein, 18 aa, Artificial Sequence
  Description of Artificial Sequence: Synthetic peptide
ARDGDFWSGYYLHSWLDP

SEQ ID NO: 4586 - DNA, 327 bp, Artificial Sequence
  Description of Artificial Sequence: Synthetic polynucleotide
cagtctgtgctgactcagccgccctcagtgtctgcggccccaggacagaaggtcaccatctcctgctctggaagcggctccaacgttgggaatagttatgtttcctggtaccagcacctcccaggaacagcccccaaactcctcatttatgacaatgataagcgaccctcagggattcctgaccgattctctggctccaagtctggcacgtcagccatcctgggcatcaccggactccagactggggacgaggccgattatttctgcggaacctgggatagcagcctgggtactgtggtcttcggcggagggaccaggctgaccgtc

SEQ ID NO: 4587 - protein, 109 aa, Artificial Sequence; identical to SEQ ID NO: 98
  Description of Artificial Sequence: Synthetic polypeptide

SEQ ID NO: 4588 - protein, 11 aa, Artificial Sequence
  Description of Artificial Sequence: Synthetic peptide
GTWDSSLGTVV

SEQ ID NO: 4589 - DNA, 358 bp, Artificial Sequence
  Description of Artificial Sequence: Synthetic polynucleotide
gaagtgcagctggtggagtctgggggaggcttggtacagcctggcaggtccctgagactctcctgtgcagcctctggattcacctttgatgattatgccatgcactgggtccggcaagctccagggaagggcctggagtgggtctcaggtatgagtggtggcataggctatgcggactctgtgaagggccgattcaccatctccagagacaacgccaagaactccctgtatctgcaaatgaacagtctgagaactgaggacacggccttgtattactgtgcaaaatccctggggggtactaattttccgggggcgtttgactcctggggccagggaaccctggtcaccgtctcctcag

SEQ ID NO: 4590 - protein, 119 aa, Artificial Sequence
  Description of Artificial Sequence: Synthetic polypeptide
EVQLVESGGGLVQPGRSLRLSCAASGFTFDDYAMHWVRQAPGKGLEWVSGMSGGIGYADSVKGRFTISRDNAKNSLYLQMNSLRTEDTALYYCAKSLGGTNFPGAFDSWGQGTLVTVSS

SEQ ID NO: 4591 - protein, 15 aa, Artificial Sequence
  Description of Artificial Sequence: Synthetic peptide
AKSLGGTNFPGAFDS

SEQ ID NO: 4592 - DNA, 331 bp, Artificial Sequence
  Description of Artificial Sequence: Synthetic polynucleotide
  modified_base (233)..(233): a, c, t, g, unknown or other
  modified_base (238)..(238): a, c, t, g, unknown or other
cagtctgccctgactcagcctgcctccgtgtctggatctcctggacagtcgatcaccatctcctgcactggatccagcagtgatgttgggagttataaccttgtctcctggtaccaacaacacccagacaaagcccccaaactcatgctttatgaggcctttaagcggccctcaggggtttctaatcgcttctctggctccaagtctggcaacacggcctccctgacaatctntgggntccaggctgaggacgaggctgattattactgctcctcatatgccggtagtaacacttatgtcttcggaactgggaccaaggtcaccgtcctag

SEQ ID NO: 4593 - protein, 110 aa, Artificial Sequence
  Description of Artificial Sequence: Synthetic polypeptide
  MOD_RES (78)..(78): Any amino acid
  MOD_RES (80)..(80): Any amino acid
QSALTQPASVSGSPGQSITISCTGSSSDVGSYNLVSWYQQHPDKAPKLMLYEAFKRPSGVSNRFSGSKSGNTASLTIXGXQAEDEADYYCSSYAGSNTYVFGTGTKVTVL

SEQ ID NO: 4594 - protein, 10 aa, Artificial Sequence
  Description of Artificial Sequence: Synthetic peptide
SSYAGSNTYV

SEQ ID NO: 4595 - DNA, 363 bp, Artificial Sequence
  Description of Artificial Sequence: Synthetic polynucleotide
caggtgcagctggtggagtctgggggaggcgtggtccagcctgggaggtccctgagactctcatgtgcagcgtctggattcaccttcagtagttatggcatgcactgggtccgccaggctccaggcaagggcctggagtgggtggcagttatatggaatgatggaactaatcattactacgcagactccgtgaagggccgattcaccatctccagagacaattccaaggataccctgtatctgcaagtgagcagcctgagagccgaggacacggctgtatattactgtgcgagaggtgtccagacatattactactacgctatggacgtctggggccaagggaccccggtcactgtctcctca

SEQ ID NO: 4596 - protein, 121 aa, Artificial Sequence
  Description of Artificial Sequence: Synthetic polypeptide
QVQLVESGGGVVQPGRSLRLSCAASGFTFSSYGMHWVRQAPGKGLEWVAVIWNDGTNHYYADSVKGRFTISRDNSKDTLYLQVSSLRAEDTAVYYCARGVQTYYYYAMDVWGQGTPVTVSS

SEQ ID NO: 4597 - protein, 14 aa, Artificial Sequence
  Description of Artificial Sequence: Synthetic peptide
ARGVQTYYYYAMDV

SEQ ID NO: 4598 - DNA, 334 bp, Artificial Sequence
  Description of Artificial Sequence: Synthetic polynucleotide
cagtctgtgctgactcagccgccctcagtgtctggggccccagggcagagggtcaccatctcctgcactgggagcagctccaacatcggggcagcttatgatgtacagtggtaccagcagcttccaggaacagcccccaaactcctcatctatggtaacaccaatcggccctcaggggtccctgaccgattctctggctccaagtctggcacctcagcctccctggccatcactgggctccaggctgacgatgaggctgattattactgccagtcctatgacagcagcctgagtggttatgtcttcggaacggggaccagggtcgccgtcctag

SEQ ID NO: 4599 - protein, 111 aa, Artificial Sequence
  Description of Artificial Sequence: Synthetic polypeptide
QSVLTQPPSVSGAPGQRVTISCTGSSSNIGAAYDVQWYQQLPGTAPKLLIYGNTNRPSGVPDRFSGSKSGTSASLAITGLQADDEADYYCQSYDSSLSGYVFGTGTRVAVL

SEQ ID NO: 4600 - protein, 11 aa, Artificial Sequence
  Description of Artificial Sequence: Synthetic peptide
QSYDSSLSGYV

SEQ ID NO: 4601 - DNA, 382 bp, Artificial Sequence
  Description of Artificial Sequence: Synthetic polynucleotide
cagctgcagctgcaggagtcgggcccaggactggtgaagccttcggagaccctgtccctcacctgcactgtctctggtggctccatcagcagtagtagttactactggggctgggtccgccagcccccagggaaggggctggagtggattgggagtatctattattacgggagcacctcctacaacccgtccctcaagagtcgagtcaccatatcagtagacacgtccaacaaccagttctccctgaagatgaggtctgtgaccgccgcagacacggccgtgtattattgtgcgagaggggtcgatttttggagtggccctttcatgggggacagttggttcgacccctggggccagggaaccctggtcgccgtctcctcag

SEQ ID NO: 4602 - protein, 127 aa, Artificial Sequence
  Description of Artificial Sequence: Synthetic polypeptide
QLQLQESGPGLVKPSETLSLTCTVSGGSISSSSYYWGWVRQPPGKGLEWIGSIYYYGSTSYNPSLKSRVTISVDTSNNQFSLKMRSVTAADTAVYYCARGVDFWSGPFMGDSWFDPWGQGTLVAVSS

SEQ ID NO: 4603 - protein, 19 aa, Artificial Sequence
  Description of Artificial Sequence: Synthetic peptide
ARGVDFWSGPFMGDSWFDP

SEQ ID NO: 4604 - DNA, 334 bp, Artificial Sequence
  Description of Artificial Sequence: Synthetic polynucleotide
cagtctgtgctgactcagccgccctcagtgtctggggccccagggcagagggtcaccatctcctgcactgggaccagctccaacatcggggcaggttatgatgtacactggtaccagcaggttccaggaaaagcccccaaactcctcatctatggtaacaccaagcggccctcaggggtccctgaccgattctctggctccaagtctggcacctcagcctccctggccatcactgggctccaggctgaggatgaggctgattattactgccagtcctatgacaacagcctgagtggttcggtgttcggcggagggaccaagctgaccgtcctag

SEQ ID NO: 4605 - protein, 111 aa, Artificial Sequence
  Description of Artificial Sequence: Synthetic polypeptide
QSVLTQPPSVSGAPGQRVTISCTGTSSNIGAGYDVHWYQQVPGKAPKLLIYGNTKRPSGVPDRFSGSKSGTSASLAITGLQAEDEADYYCQSYDNSLSGSVFGGGTKLTVL

SEQ ID NO: 4606 - protein, 11 aa, Artificial Sequence
  Description of Artificial Sequence: Synthetic peptide
QSYDNSLSGSV

SEQ ID NO: 4607 - DNA, 372 bp, Artificial Sequence; identical to SEQ ID NO: 4433
  Description of Artificial Sequence: Synthetic polynucleotide

SEQ ID NO: 4608 - protein, 124 aa, Artificial Sequence; identical to SEQ ID NO: 4434
  Description of Artificial Sequence: Synthetic polypeptide

SEQ ID NO: 4609 - protein, 17 aa, Artificial Sequence
  Description of Artificial Sequence: Synthetic peptide
ASSEDDYDDGTYWYFDV

SEQ ID NO: 4610 - DNA, 331 bp, Artificial Sequence
  Description of Artificial Sequence: Synthetic polynucleotide
cagtctgtgctgactcagccaccctcagcgtctgggacccccgggcagagggtcaccatctcttgttctggaagcagctccaacatcagaagtaatactgtaaactggtaccagcagctcccaggaacggcccccaaactcctcatctatagtaatgatcagcggccctcaggggtccctgaccgattctctgcctccaagtctggcacctcagcctccctggccatcagtgggctccagtctgaggatgagtctgattattactgtgcagcatgggatggcagcctgaatggttgggtgttcggcggagggaccaagctgaccgtcctag

SEQ ID NO: 4611 - protein, 110 aa, Artificial Sequence
  Description of Artificial Sequence: Synthetic polypeptide
QSVLTQPPSASGTPGQRVTISCSGSSSNIRSNTVNWYQQLPGTAPKLLIYSNDQRPSGVPDRFSASKSGTSASLAISGLQSEDESDYYCAAWDGSLNGWVFGGGTKLTVL

SEQ ID NO: 4612 - protein, 11 aa, Artificial Sequence
  Description of Artificial Sequence: Synthetic peptide
AAWDGSLNGWV

SEQ ID NO: 4613 - DNA, 385 bp, Artificial Sequence
  Description of Artificial Sequence: Synthetic polynucleotide
caggtgcagctggtggagtctgggggaggcttggtcaagcctggagggtccctgagactctcctgtgcagtctctggatttaccttctctgcctactccatgagctggatccgccaggttccagggaagggactggagtgggtttcatacattagtggtcgtggtgattccatatactatgcagactctgtgaagggccgattcaccatctccaggaacgacgcccggaattcactgtctctgcagatgaaaagcctgagagtcgaagactcgggcgtgtactactgtgcgcgagatctcacacagggggatttttggagtggtttcctcaactacaactggttcgacccctggggccagggaaccctggtcaccgtctcctcag

SEQ ID NO: 4614 - protein, 128 aa, Artificial Sequence
  Description of Artificial Sequence: Synthetic polypeptide
QVQLVESGGGLVKPGGSLRLSCAVSGFTFSAYSMSWIRQVPGKGLEWVSYISGRGDSIYYADSVKGRFTISRNDARNSLSLQMKSLRVEDSGVYYCARDLTQGDFWSGFLNYNWFDPWGQGTLVTVSS

SEQ ID NO: 4615 - protein, 21 aa, Artificial Sequence
  Description of Artificial Sequence: Synthetic peptide
ARDLTQGDFWSGFLNYNWFDP

SEQ ID NO: 4616 - DNA, 330 bp, Artificial Sequence
  Description of Artificial Sequence: Synthetic polynucleotide
cagtctgtgctgactcagcctgcctccgtgtctgggtctcctggacagtcgatcaccatctcctgcactggaaccagcagtgacattggtggttattcctatgtctcctggtaccaacaacacccaggcaaggcccccaaactcatcctttatgaggtcagtgatcggccctcaggggtccctgatcggttctctggctccaagtctggcaacacggcttccctgaccatctctgggctccaggctgacgacgaggctgattattattgcagttcatatacaatcaacaatgttagggtgttcggcggagggaccaagctgaccgtccta

SEQ ID NO: 4617 - protein, 110 aa, Artificial Sequence
  Description of Artificial Sequence: Synthetic polypeptide
QSVLTQPASVSGSPGQSITISCTGTSSDIGGYSYVSWYQQHPGKAPKLILYEVSDRPSGVPDRFSGSKSGNTASLTISGLQADDEADYYCSSYTINNVRVFGGGTKLTVL

SEQ ID NO: 4618 - protein, 10 aa, Artificial Sequence
  Description of Artificial Sequence: Synthetic peptide
SSYTINNVRV

SEQ ID NO: 4619 - DNA, 385 bp, Artificial Sequence
  Description of Artificial Sequence: Synthetic polynucleotide
caggtgcagctggtggagtctgggggagggttggtcaagtctggagggtccctgagactctcctgtgcagcctctggattcaccttcagtgactaccagatgaactggatccgccaggctccagggaaggggctggagtggatttcatacattagtggtagtggtagtaccatatactacgcagactctgtgaagggccgattcaccatctccagggacaacgccaagaagtcactgtatctgcaaatgaacagcctgagagccgaggacacggccgtgtattactgtgcgagagatttcacacagggaaatttttggagtggtttcctcaactacaactggttcgacccctggggccagggaaccctggtcaccgtctcctcag

SEQ ID NO: 4620 - protein, 128 aa, Artificial Sequence
  Description of Artificial Sequence: Synthetic polypeptide
QVQLVESGGGLVKSGGSLRLSCAASGFTFSDYQMNWIRQAPGKGLEWISYISGSGSTIYYADSVKGRFTISRDNAKKSLYLQMNSLRAEDTAVYYCARDFTQGNFWSGFLNYNWFDPWGQGTLVTVSS

SEQ ID NO: 4621 - protein, 21 aa, Artificial Sequence
  Description of Artificial Sequence: Synthetic peptide
ARDFTQGNFWSGFLNYNWFDP

SEQ ID NO: 4622 - DNA, 331 bp, Artificial Sequence
  Description of Artificial Sequence: Synthetic polynucleotide
cagtctgtgctgactcagcctgcctccgtgtctgggtctcctggacagtcgatcaccatctcctgcactggaaccagcagtgacgttggtggttatagctatgtctcctggtaccaacagcacccaggcaaagcccccaaactcatgatttatgaggtcagtaatcggccctcaggggtccctgatcgcttctctggctccaagtctggcaacacggcctccctgaccatctctgggctccaggctgaggacgaggctgattattactgcagctcatatacaaccagcagcactagggtattcggcggagggaccaagctgaccgtcctag

SEQ ID NO: 4623 - protein, 110 aa, Artificial Sequence
  Description of Artificial Sequence: Synthetic polypeptide
QSVLTQPASVSGSPGQSITISCTGTSSDVGGYSYVSWYQQHPGKAPKLMIYEVSNRPSGVPDRFSGSKSGNTASLTISGLQAEDEADYYCSSYTTSSTRVFGGGTKLTVL

SEQ ID NO: 4624 - protein, 10 aa, Artificial Sequence
  Description of Artificial Sequence: Synthetic peptide
SSYTTSSTRV

SEQ ID NO: 4625 - DNA, 379 bp, Artificial Sequence
  Description of Artificial Sequence: Synthetic polynucleotide
caggtgcagctggtggagtctgggggaggcgtggtccagcctgggaggtccctgagactctcctgtgcagcctctggcttctccttcagtacttatgctatgcactgggtccgccaggctcccggcgaggggctggaatggctggcagtgatttcaaatgatggaaacgaaaaatattatagagactcagtgaagggccgtttcaccgtctccagagacaattccaaggccactctgtatctgcaaatgagcagtctgagacctgaagacacggctatttatttctgtgcgagagatcgggcgtgtggaagaaccaactgcaattatcccgcccgcctcggcccctggggtccgggaaccctggtcaccgtctcctcag

SEQ ID NO: 4626 - protein, 126 aa, Artificial Sequence
  Description of Artificial Sequence: Synthetic polypeptide
QVQLVESGGGVVQPGRSLRLSCAASGFSFSTYAMHWVRQAPGEGLEWLAVISNDGNEKYYRDSVKGRFTVSRDNSKATLYLQMSSLRPEDTAIYFCARDRACGRTNCNYPARLGPWGPGTLVTVSS

SEQ ID NO: 4627 - protein, 19 aa, Artificial Sequence
  Description of Artificial Sequence: Synthetic peptide
ARDRACGRTNCNYPARLGP

SEQ ID NO: 4628 - DNA, 330 bp, Artificial Sequence
  Description of Artificial Sequence: Synthetic polynucleotide
cagtctgtgctgactcagcctcgctcagtgtccgggtctcctggacagtcagtcaccatctcctgcactggaaccagcagtgacattggtacttataagtatgtctcctggtaccaacaacttccaggcaaagcccccgaactcattctttatgatgtcactgagcggccctcaggggtccctgatcgcttctctggctccaagtctggcaacacggcctccctgaccatctctcggctccaggccgaggacgaggctcattactactgttcctcatattctggcaggtacattgtgatcttcggcggagggacgaagctgaccgtccta

SEQ ID NO: 4629 - protein, 110 aa, Artificial Sequence
  Description of Artificial Sequence: Synthetic polypeptide
QSVLTQPRSVSGSPGQSVTISCTGTSSDIGTYKYVSWYQQLPGKAPELILYDVTERPSGVPDRFSGSKSGNTASLTISRLQAEDEAHYYCSSYSGRYIVIFGGGTKLTVL

SEQ ID NO: 4630 - protein, 10 aa, Artificial Sequence
  Description of Artificial Sequence: Synthetic peptide
SSYSGRYIVI

SEQ ID NO: 4631 - DNA, 370 bp, Artificial Sequence
  Description of Artificial Sequence: Synthetic polynucleotide
gaggtgcagctgttggagtctgggggagccttggttcagcctgggaagtccctgagactctcctgtgtggcctctggattcacctttaggaattatgccatgacgtgggtccggcaggctccagggaaggggctggagtgggtctccggcctcagtggtagtggtgatgacacatactacgcagactccgtgaagggccggttcaccatttccagagacaattcgaagaacaccctgtttctgcaaatgaacagcctgagacccgaggacacggccgtatattactgtgcgaaagatcgggcctccgatttttggagtggttttgggttcgacccctggggccagggcaccctggtcaccgtctcctcag

SEQ ID NO: 4632 - protein, 123 aa, Artificial Sequence
  Description of Artificial Sequence: Synthetic polypeptide
EVQLLESGGALVQPGKSLRLSCVASGFTFRNYAMTWVRQAPGKGLEWVSGLSGSGDDTYYADSVKGRFTISRDNSKNTLFLQMNSLRPEDTAVYYCAKDRASDFWSGFGFDPWGQGTLVTVSS

SEQ ID NO: 4633 - protein, 16 aa, Artificial Sequence
  Description of Artificial Sequence: Synthetic peptide
AKDRASDFWSGFGFDP

SEQ ID NO: 4634 - DNA, 331 bp, Artificial Sequence
  Description of Artificial Sequence: Synthetic polynucleotide
cagtctgtgctgactcaggcacccccagcgtctgggacccccgggcagacggtcaccatctcttgttctggaagcagctccaacatcgggacaaatactgtgaactggtaccaacaagtcccaggaacggcccccaaactcctcatctatagtaataatcagcggccctcaggggtccctaagcgattctctggctccaagtctggcacctcagcctccctggccatcagtgggctccagtctgacgatgaggctgattattactgtgcagcatgggatgacagcctgaatggtgtcctattcggcggagggaccaagctgaccgtcctag

SEQ ID NO: 4635 - protein, 110 aa, Artificial Sequence
  Description of Artificial Sequence: Synthetic polypeptide
QSVLTQAPPASGTPGQTVTISCSGSSSNIGTNTVNWYQQVPGTAPKLLIYSNNQRPSGVPKRFSGSKSGTSASLAISGLQSDDEADYYCAAWDDSLNGVLFGGGTKLTVL

SEQ ID NO: 4636 - protein, 11 aa, Artificial Sequence
  Description of Artificial Sequence: Synthetic peptide
AAWDDSLNGVL

SEQ ID NO: 4637 - DNA, 355 bp, Artificial Sequence; identical to SEQ ID NO: 231
  Description of Artificial Sequence: Synthetic polynucleotide

SEQ ID NO: 4638 - protein, 118 aa, Artificial Sequence; identical to SEQ ID NO: 113
  Description of Artificial Sequence: Synthetic polypeptide

SEQ ID NO: 4639 - protein, 11 aa, Artificial Sequence
  Description of Artificial Sequence: Synthetic peptide
ARNFGSTGGQY

SEQ ID NO: 4640 - DNA, 322 bp, Artificial Sequence
  Description of Artificial Sequence: Synthetic polynucleotide
gacatccagatgacccagtctccatcctccctgtctgcttctgttggagacagagtcaccatcacttgccaggcgagtcaggacattagcaactatttaaattggtatcagcagaaacctgggaaagcccctaagctcctgatctacgacgcatcaaatttggagacaggggtcccatcaaggttcagtgggagtggatctgggacacattttagtttcaccatcagcagcctgcaggctgaagatattggcacatattactgtcaacagtatgacaatgtccggctcgctttcggcggggggaccaaggtggagatcaaac

SEQ ID NO: 4641 - protein, 107 aa, Artificial Sequence
  Description of Artificial Sequence: Synthetic polypeptide
DIQMTQSPSSLSASVGDRVTITCQASQDISNYLNWYQQKPGKAPKLLIYDASNLETGVPSRFSGSGSGTHFSFTISSLQAEDIGTYYCQQYDNVRLAFGGGTKVEIK

SEQ ID NO: 4642 - protein, 9 aa, Artificial Sequence
  Description of Artificial Sequence: Synthetic peptide
QQYDNVRLA

SEQ ID NO: 4643 - DNA, 367 bp, Artificial Sequence
  Description of Artificial Sequence: Synthetic polynucleotide
caggtgcagctggtgcagtctggggctgaggtgaagaagcctgggtcctcggtgagggtctcctgcaaggtttctggagacaccttcagcaactatgctatcagctgggtgcgacaggcccctggacaagggcttgagtggatgggggggatcatccctatgtttgggacaacaacctacggacagaagttcaaggccagagtcacgattaccgcggacgaatcgacgagcacagcctatgtggaattgaacagcctgacatctgaagacacggccatgtattactgtgcgagagggggcctaaggatggcaacaatttctacttacgcgcactgggggcagggaaccctgatcaccgtctcttcag

SEQ ID NO: 4644 - protein, 117 aa, Artificial Sequence
  Description of Artificial Sequence: Synthetic polypeptide
QVQLVQSGAEVKKPGSSVKVSCKASGGTFRNYAFSWVRLAPGQGLEWMGQIIPFFGTPNYAQKFQGRVTITADESTSTAYMELTSLRSEDTAVYFCARDAFEEMAYWGQGTQVTVSS

SEQ ID NO: 4645 - protein, 10 aa, Artificial Sequence
  Description of Artificial Sequence: Synthetic peptide
ARDAFEEMAY

SEQ ID NO: 4646 - DNA, 334 bp, Artificial Sequence
  Description of Artificial Sequence: Synthetic polynucleotide
  modified_base (25)..(25): a, c, t, g, unknown or other
gatattgtgatgacccagactccantctcctcgcatgtcacccttggacagccggcctccatctcctgcaggtctagtcaaagcctcgtacacagtgatggaaacacctacttgagttggcttcaactgaggccaggccagcctccaagactcctaatttatcagatttctaaccggttctctggggtcccagacagattcagtggcagtggggcagggacagatttcacactgaaaatcagcagggtggaagctgacgatgtcggcgtttattactgcatgcaggctacacatgggaggacgttcggccaagggaccaaggtggaaatcaaac

SEQ ID NO: 4647 - protein, 111 aa, Artificial Sequence
  Description of Artificial Sequence: Synthetic polypeptide
  MOD_RES (9)..(9): Any amino acid
DIVMTQTPXSSHVTLGQPASISCRSSQSLVHSDGNTYLSWLQLRPGQPPRLLIYQISNRFSGVPDRFSGSGAGTDFTLKISRVEADDVGVYYCMQATHGRTFGQGTKVEIK

SEQ ID NO: 4648 - protein, 8 aa, Artificial Sequence
  Description of Artificial Sequence: Synthetic peptide
MQATHGRT

SEQ ID NO: 4649 - DNA, 355 bp, Artificial Sequence
  Description of Artificial Sequence: Synthetic polynucleotide
caggtgcagctggtgcagtctggggctgaggtgaagaagcctgggtcctcggtgaaggtctcctgccaggcttctggaggcaccttcagcaactatgctatcaagtgggtgcgacaggcccctggacaagggtttgagtggatgggagggatcatccctttctttgccacaccgacctacgcacagaagttccagggcagagtcacgatcagcgcggacgaatccacgagcacagcctacatggagctgagcaacctgagatctgaggacacggccgtgtattattgtgcgaggagctatggttcgtcggggggagactactggggccagggaacccgggtcaccgtctcctcag

SEQ ID NO: 4650 - protein, 125 aa, Artificial Sequence
  Description of Artificial Sequence: Synthetic polypeptide
QVQLVESGGRVVQPGRSLRLSCAASGFTLSRYGMHWVRQAPGKGLEWVAVSWYDASNEEYAESVKGRFTISRDNSKNTLYLQMNSLRAEDSAVYYCARDYYAFDEVGPINCFEYWGRGTQVTVSS

SEQ ID NO: 4651 - protein, 18 aa, Artificial Sequence
  Description of Artificial Sequence: Synthetic peptide
ARDYYAFDEVGPINCFEY

SEQ ID NO: 4652 - DNA, 325 bp, Artificial Sequence
  Description of Artificial Sequence: Synthetic polynucleotide
gaaattgtgttgacacagtctccagccaccctgtctttgtctccagggaaaagagccaccctctcctgcagggccagtcagagtgttgacagcaactacttagcctggtaccaacagaaacctggccaggctcccaggctcctcatctctggtgcatccaacagggccactggcatcccagccaggttcagtggcagtgggtctgggaaagacttcactctcaccatcagcagcctagagtctgaagattttgcagtttattactgtcagcagcgtagcaactggcctctcactttcggccctgggaccaaagtggatgtcaaac

SEQ ID NO: 4653 - protein, 108 aa, Artificial Sequence
  Description of Artificial Sequence: Synthetic polypeptide
EIVLTQSPATLSLSPGKRATLSCRASQSVDSNYLAWYQQKPGQAPRLLISGASNRATGIPARFSGSGSGKDFTLTISSLESEDFAVYYCQQRSNWPLTFGPGTKVDVK

SEQ ID NO: 4654 - protein, 9 aa, Artificial Sequence
  Description of Artificial Sequence: Synthetic peptide
QQRSNWPLT

SEQ ID NO: 4655 - DNA, 367 bp, Artificial Sequence
  Description of Artificial Sequence: Synthetic polynucleotide
caggtccagctggtgcagtctggggctgaggtgaagaagcctgggtcctcggtgaaggtctcctgcaaggcttctggagacaccttcagtaactatgctatcagttgggtgcgacaggcccctggacaagggcttgagtggatgggagggataatccctatgtttggaacaacaacttacggacggaagttcaagggcagactcacaattaccgcggacgagtccacgaccacagcttacatggagttgaccagcctgagatctgaggacacggccctttattactgtgcgagagggggcctaaggatggctacaatctctacttacgcgcactggggccagggaaccctggtcaccgtctcctcag

SEQ ID NO: 4656 - protein, 118 aa, Artificial Sequence
  Description of Artificial Sequence: Synthetic polypeptide
QVQLVQSGAEVKKPGSTVKVSCEASGGTFSNYDISWVRQAPGQGLEWMGGIIPVFGTAKYAQKFQGRVTITADISTSTAYMELSSLRSDDTAVFYCARDGGTGSYDYWGQGTLVTVSS

SEQ ID NO: 4657 - protein, 11 aa, Artificial Sequence
  Description of Artificial Sequence: Synthetic peptide
ARDGGTGSYDY

SEQ ID NO: 4658 - DNA, 337 bp, Artificial Sequence
  Description of Artificial Sequence: Synthetic polynucleotide
gatattgtgatgactcagtctccactctccctgcccgtcacccctggagagccggcctccatctcctgcaggtctagtcagagcctcctccataggagtggagacaactatttggattggtacctgcagaagccagggcagtctccacaactcctgatctatttggcttcttatcgggcctccggggtccctgacaggttcagtggcagtggatcaggcacacattttacactgaagatcagcagagtggaggctgaggacgttggggtttattactgcatgcaagctctacaaactcctcggacgttcggccaagggaccaaggtagaaatcaaac

SEQ ID NO: 4659 - protein, 112 aa, Artificial Sequence
  Description of Artificial Sequence: Synthetic polypeptide
DIVMTQSPLSLPVTPGEPASISCRSSQSLLHRSGDNYLDWYLQKPGQSPQLLIYLASYRASGVPDRFSGSGSGTHFTLKISRVEAEDVGVYYCMQALQTPRTFGQGTKVEIK

SEQ ID NO: 4660 - protein, 9 aa, Artificial Sequence
  Description of Artificial Sequence: Synthetic peptide
MQALQTPRT

SEQ ID NO: 4661 - DNA, 355 bp, Artificial Sequence
  Description of Artificial Sequence: Synthetic polynucleotide
caggtgcagctggtgcagtctggggctgaggtgaagaagcctgggtcctcggtgaaggtctcctgcaaggcctctggaggcaccttcagccactatgctatctgctgggtgcgacaggcccctggacaaggccttgagtggatgggagcgatcatccctgcctttgggacagccacgtatgcacagaagttcaagggcagagtcaccattaccgcggacgaatccacgagcacagcctacatggaggtgaccagcctgagatttgacgacacggccgtctttttctgtgcgcgagaggacggggtcggatcctatgactcctggggccagggaaccctggtcaccgtctcctcag

SEQ ID NO: 4662 - protein, 119 aa, Artificial Sequence
  Description of Artificial Sequence: Synthetic polypeptide
QVQLVQSGAEVKKPGSSVKVSCKSSGGNFNNFAISWVRQAPGQGLEWMGGIIPIFGTPNYAQKFQGRVTITADKSTTTAYMEVNSLRSDDTAVYYCAREGGSAAEFEFWGQGTLVTVSS

SEQ ID NO: 4663 - protein, 12 aa, Artificial Sequence
  Description of Artificial Sequence: Synthetic peptide
AREGGSAAEFEF

SEQ ID NO: 4664 - DNA, 322 bp, Artificial Sequence
  Description of Artificial Sequence: Synthetic polynucleotide
  modified_base (103)..(103): a, c, t, g, unknown or other
  modified_base (108)..(108): a, c, t, g, unknown or other
  modified_base (110)..(110): a, c, t, g, unknown or other
gacatccagatgacccagtctccatcctccctgtctgcctctgtgggggacagagtcaccatcacttgccgggcaggtcagagcattaatatgtattttatgnggcangnaccgatctccctgtatgcctctgagggggtcagagtcaccatctcctgccgggcaggtggtgtcccatcaaggttcagtggcagtggatctgggacagatttcactctcaccatcagcagtctgcaacctgaagattttgcaacttactactgtcaacagagttacagaatgcctcggacgttcgggcaagggaccaaggtggagatcaaac

SEQ ID NO: 4665 - protein, 107 aa, Artificial Sequence
  Description of Artificial Sequence: Synthetic polypeptide
  MOD_RES (35)..(37): Any amino acid
DIQMTQSPSSLSASVGDRVTITCRAGQSINMYFMXXXPISLYASEGVRVTISCRAGGVPSRFSGSGSGTDFTLTISSLQPEDFATYYCQQSYRMPRTFGQGTKVEIK

SEQ ID NO: 4666 - protein, 9 aa, Artificial Sequence
  Description of Artificial Sequence: Synthetic peptide
QQSYRMPRT

SEQ ID NO: 4667 - skipped

SEQ ID NO: 4668 - protein, 119 aa, Artificial Sequence
  Description of Artificial Sequence: Synthetic polypeptide
QVQLVQSGAEVTKPGSSVKVSCKASGGTFSNYDISWVRQAPGQGLEWMGGIIPIFGTPNYAQKFQGRVTITADISTSTAYMELRSLRSEDTAVYYCARDGGAVAAFDYWGQGTLVTVSS

SEQ ID NO: 4669 - protein, 12 aa, Artificial Sequence
  Description of Artificial Sequence: Synthetic peptide
ARDGGAVAAFDY

SEQ ID NO: 4670 - DNA, 337 bp, Artificial Sequence
  Description of Artificial Sequence: Synthetic polynucleotide
gatattgtgatgacccagactccactctctctgtccgtcacccctggacagccggcctccatctcctgcaagtctagtcagagcctcctccataatgatggaaagacctatttgtattggtacctgcagaagccaggccagcctccacagctcctgatctatgaagtttccaaccggttctctggagtgccagataggttcagtggcagcgggtcagggacagatttcacactgaaaatcagccgggtggaggctgaggatgttgggttttattactgcatgcagagtatacaccttccccggacgttcggccaagggaccaaggtggaaatcaaac

SEQ ID NO: 4671 - protein, 112 aa, Artificial Sequence
  Description of Artificial Sequence: Synthetic polypeptide
DIVMTQTPLSLSVTPGQPASISCKSSQSLLHNDGKTYLYWYLQKPGQPPQLLIYEVSNRFSGVPDRFSGSGSGTDFTLKISRVEAEDVGFYYCMQSIHLPRTFGQGTKVEIK

SEQ ID NO: 4672 - protein, 9 aa, Artificial Sequence
  Description of Artificial Sequence: Synthetic peptide
MQSIHLPRT

SEQ ID NO: 4673 - skipped

SEQ ID NO: 4674 - protein, 122 aa, Artificial Sequence
  Description of Artificial Sequence: Synthetic polypeptide
QVQLVQSGAEVKKPGSSVRVSCKVSGDTFSNYAISWVRQAPGQGLEWMGGIIPMFGTTTYGQKFKARVTITADESTSTAYVELNSLTSEDTAMYYCARGGLRMATISTYAHWGQGTLITVSS

SEQ ID NO: 4675 - protein, 15 aa, Artificial Sequence
  Description of Artificial Sequence: Synthetic peptide
ARGGLRMATISTYAH

SEQ ID NO: 4676 - DNA, 346 bp, Artificial Sequence
  Description of Artificial Sequence: Synthetic polynucleotide
gacatcgtgatgacccagtctccagactccctggctgtgtctctgggcgggagggccaccctcaactgcaagtccagccagagtgttttaaacacctccaacaataaaaactacttagggtggtaccagcagaagccaggacagcctcctaggctgctcattaactgggcctcaacccgggaatcgggggtccctgaccgattcagtggcagcgggtccgggacagatttcactctcaccatcatcagggtgcaggctgaagatgtgggagtttattactgtcagcaattttatcgtactcctcaagcgatcaccttcggccaagggacacgactggagattaaac

SEQ ID NO: 4677 - protein, 115 aa, Artificial Sequence
  Description of Artificial Sequence: Synthetic polypeptide
DIVMTQSPDSLAVSLGGRATLNCKSSQSVLNTSNNKNYLGWYQQKPGQPPRLLINWASTRESGVPDRFSGSGSGTDFTLTIIRVQAEDVGVYYCQQFYRTPQAITFGQGTRLEIK

SEQ ID NO: 4678 - protein, 11 aa, Artificial Sequence
  Description of Artificial Sequence: Synthetic peptide
QQFYRTPQAIT

SEQ ID NO: 4679 - skipped

SEQ ID NO: 4680 - protein, 125 aa, Artificial Sequence; identical to SEQ ID NO: 103
  Description of Artificial Sequence: Synthetic polypeptide

SEQ ID NO: 4681 - protein, 18 aa, Artificial Sequence
  Description of Artificial Sequence: Synthetic peptide
ARDSYPFDEVGPINYFAY

SEQ ID NO: 4682 - DNA, 316 bp, Artificial Sequence; identical to SEQ ID NO: 222
  Description of Artificial Sequence: Synthetic polynucleotide

SEQ ID NO: 4683 - protein, 105 aa, Artificial Sequence; identical to SEQ ID NO: 104
  Description of Artificial Sequence: Synthetic polypeptide

SEQ ID NO: 4684 - protein, 9 aa, Artificial Sequence
  Description of Artificial Sequence: Synthetic peptide
QQRTHWPLT

SEQ ID NO: 4685 - skipped

SEQ ID NO: 4686 - protein, 118 aa, Artificial Sequence
  Description of Artificial Sequence: Synthetic polypeptide
QVQLVQSGAEVKKPGSSVKVSCKASGGTFSNYAISWVRQAPGQGLEWMGDIIPIFGTANYAQKFQGRVTITADESTSTGYMELTRLKSDDTAVYYCARDGGMASFDYWGQGTLVTVSS

SEQ ID NO: 4687 - protein, 11 aa, Artificial Sequence
  Description of Artificial Sequence: Synthetic peptide
ARDGGMASFDY

SEQ ID NO: 4688 - DNA, 337 bp, Artificial Sequence
  Description of Artificial Sequence: Synthetic polynucleotide
gatattgtgatgactcagtctccactctccctgcccgtcacccctggagagccggcctccatctcctgcaggtctagtcagagcctcctacataggactggatacaactatttggattggtacctgcagaagccagggcagtctccacagctcctgatctatttgggttctaatcgggcctccggggtccctgacaggttcagtggcagtggatcaggcacagattttacactgaaaatcagcagagtggaggctgaggatgttggggtttattactgcatgcaagctctacaaactcctcgaactttcggcggagggaccaaggtggagatcaaac

SEQ ID NO: 4689 - protein, 112 aa, Artificial Sequence
  Description of Artificial Sequence: Synthetic polypeptide
DIVMTQSPLSLPVTPGEPASISCRSSQSLLHRTGYNYLDWYLQKPGQSPQLLIYLGSNRASGVPDRFSGSGSGTDFTLKISRVEAEDVGVYYCMQALQTPRTFGGGTKVEIK

SEQ ID NO: 4690 - protein, 9 aa, Artificial Sequence
  Description of Artificial Sequence: Synthetic peptide
MQALQTPRT

SEQ ID NO: 4691 - skipped

SEQ ID NO: 4692 - protein, 123 aa, Artificial Sequence
  Description of Artificial Sequence: Synthetic polypeptide
EVQLVESGGGLVPPGGSLRLSCAASGFSFRSYWMHWVRQAPGKGLVWVSRLNSVGSVTSYADSVKGRFTISRDNAKNMLYLQLNSLTADDTAVYYCASGGLGLTTTTDYFDNWGQGTQVTVSS

SEQ ID NO: 4693 - protein, 16 aa, Artificial Sequence
  Description of Artificial Sequence: Synthetic peptide
ASGGLGLTTTTDYFDN

SEQ ID NO: 4694 - DNA, 325 bp, Artificial Sequence
  Description of Artificial Sequence: Synthetic polynucleotide
gaaatagtgatgacgcagtctccagccaccctgtctgtgtctccaggggaaagagccaccctctcctgcagggccagtcagagtattagtaacaagttagcctggtaccagcagaaacctggccaggctcccaggctcctcatctatgatgtatccaccagggccactggtatcccagccaggttcagtggcagtgggtctgggacagagttctctctcaccatcagcagcctgcagtctgaagattttgcactttattactgtcagcagtattataactggcctccgtggacgttcggccaagggaccaaggtggataacaaac

SEQ ID NO: 4695 - protein, 108 aa, Artificial Sequence
  Description of Artificial Sequence: Synthetic polypeptide
EIVMTQSPATLSVSPGERATLSCRASQSISNKLAWYQQKPGQAPRLLIYDVSTRATGIPARFSGSGSGTEFSLTISSLQSEDFALYYCQQYYNWPPWTFGQGTKVDNK

SEQ ID NO: 4696 - protein, 10 aa, Artificial Sequence
  Description of Artificial Sequence: Synthetic peptide
QQYYNWPPWT

SEQ ID NO: 4697 - skipped

SEQ ID NO: 4698 - protein, 118 aa, Artificial Sequence
  Description of Artificial Sequence: Synthetic polypeptide
QVQLVQSGAEVKKPGSSVKVSCKVSGGTFSNYAISWVRQAPGQGLEWMGDIIPIFRSANYAQKFQGRVTITADESTSTGYMELTSLRSDDTAVYYCARDGGMASFDYWGQGTLVTVSS

SEQ ID NO: 4699 - protein, 11 aa, Artificial Sequence
  Description of Artificial Sequence: Synthetic peptide
ARDGGMASFDY

SEQ ID NO: 4700 - DNA, 337 bp, Artificial Sequence
  Description of Artificial Sequence: Synthetic polynucleotide
gatattgtgatgactcagtctccactctccctgcccgtcacccctggagagccggcctccatctcatgcaggtctagtcagagcctcctacataggactggagacaactatttggattggtacctgcagaagccagggcagtctccacagctcctgatctatttgggttctaatcgggcctccggggtccctgacaggttcagtggcagtggatcaggcacagattttacactgaaaatcagcagagtggaggctgaggatgttggggtttattactgcatgcaagctctacaaactcctcgaactttcggcggagggaccaaggtggagatcaaac

SEQ ID NO: 4701 - protein, 112 aa, Artificial Sequence
  Description of Artificial Sequence: Synthetic polypeptide
DIVMTQSPLSLPVTPGEPASISCRSSQSLLHRTGDNYLDWYLQKPGQSPQLLIYLGSNRASGVPDRFSGSGSGTDFTLKISRVEAEDVGVYYCMQALQTPRTFGGGTKVEIK

SEQ ID NO: 4702 - protein, 9 aa, Artificial Sequence
  Description of Artificial Sequence: Synthetic peptide
MQALQTPRT

SEQ ID NO: 4703 - skipped

SEQ ID NO: 4704 - protein, 119 aa, Artificial Sequence; identical to SEQ ID NO: 117
  Description of Artificial Sequence: Synthetic polypeptide

SEQ ID NO: 4705 - protein, 12 aa, Artificial Sequence
  Description of Artificial Sequence: Synthetic peptide
ARDGGALAAFEY

SEQ ID NO: 4706 - DNA, 337 bp, Artificial Sequence
  Description of Artificial Sequence: Synthetic polynucleotide
gatattgtgatgacccagactccattctccctgtccgtcacccctggacagccggcctccatctcctgcaaatctagtcggagcctcctgcatagtgatggaaacacctatctgttttggtacttgcagaagccaggccagcctccacagctcctgatctatgaagtttccaaccggttctctggagtgtcagataggttcagtggcagcgggtcagggacagatttcacactgaaaatcagtcgggtggaggctgaggatgttggggtttattactgcatgcaaagtatacagcgtccccggacgttcggccaagggaccaaggtggaaatcaaac

SEQ ID NO: 4707 - protein, 112 aa, Artificial Sequence
  Description of Artificial Sequence: Synthetic polypeptide
DIVMTQTPFSLSVTPGQPASISCKSSRSLLHSDGNTYLFWYLQKPGQPPQLLIYEVSNRFSGVSDRFSGSGSGTDFTLKISRVEAEDVGVYYCMQSIQRPRTFGQGTKVEIK

SEQ ID NO: 4708 - protein, 9 aa, Artificial Sequence
  Description of Artificial Sequence: Synthetic peptide
MQSIQRPRT

SEQ ID NO: 4709 - skipped

SEQ ID NO: 4710 - protein, 118 aa, Artificial Sequence
  Description of Artificial Sequence: Synthetic polypeptide
QVQLVQSGAEVKKPGSSVKVSCQASGGTFSNYAIKWVRQAPGQGFEWMGGIIPFFATPTYAQKFQGRVTISADESTSTAYMELSNLRSEDTAVYYCARSYGSSGGDYWGQGTRVTVSS

SEQ ID NO: 4711 - protein, 11 aa, Artificial Sequence
  Description of Artificial Sequence: Synthetic peptide
ARSYGSSGGDY

SEQ ID NO: 4712 - DNA, 322 bp, Artificial Sequence
  Description of Artificial Sequence: Synthetic polynucleotide
gacatccagatgacccagtctccatcctccctgtctgcatctgtaggagacagagtcaccatcacttgccaggcgagtcaggacattagcgactatttaaattggtatcagcaaaaaccagggaaagcccctaagctcttgatctacgatgcatccaatttggaaacaggggtcccatcaaggttcagtggaagtcgatctgggacacattttactttcaccatcagcagcctgcagcctgaagattttgcaacatattactgtcagcagtatgatgctctccggctcactttcggcggagggaccaaggtggacatcaaac

SEQ ID NO: 4713 - protein, 107 aa, Artificial Sequence
  Description of Artificial Sequence: Synthetic polypeptide
DIQMTQSPSSLSASVGDRVTITCQASQDISDYLNWYQQKPGKAPKLLIYDASNLETGVPSRFSGSRSGTHFTFTISSLQPEDFATYYCQQYDALRLTFGGGTKVDIK

SEQ ID NO: 4714 - protein, 9 aa, Artificial Sequence
  Description of Artificial Sequence: Synthetic peptide
QQYDALRLT

SEQ ID NO: 4715 - skipped

SEQ ID NO: 4716 - protein, 120 aa, Artificial Sequence
  Description of Artificial Sequence: Synthetic polypeptide
QVQLVQSGAEVKKPGASVKVSCKTSGYTFSTYGISWVRQAPGQGLEWMGWISGYNGHTSYAQNFRDRVAMTTDASTNTVYMELRSLRSDDTAVYFCARVQTFRYWYFDLWGRGTLVTVSS

SEQ ID NO: 4717 - protein, 13 aa, Artificial Sequence
  Description of Artificial Sequence: Synthetic peptide
ARVQTFRYWYFDL

SEQ ID NO: 4718 - DNA, 337 bp, Artificial Sequence
  Description of Artificial Sequence: Synthetic polynucleotide
gatattgtgatgactcagtctccactctccctgtccgtcacccctggagagccggcctccatctcctgcaggtctagtcagagcctcctgcagagtaatgaaaagaactatttagattggtacttgcagaagccagggcagcctccacagctcctgatctatttgggttctaatcgggcctccggggtccctgacaggttcagtgtcagtggatcaggcacagattttacactgagaatcaccagagtggaggctgaagatgttggggtttattactgcatgcaaaatctacaaactccgatcaccttcggccaagggacacgactggaaattaaac

SEQ ID NO: 4719 - protein, 112 aa, Artificial Sequence
  Description of Artificial Sequence: Synthetic polypeptide
DIVMTQSPLSLSVTPGEPASISCRSSQSLLQSNEKNYLDWYLQKPGQPPQLLIYLGSNRASGVPDRFSVSGSGTDFTLRITRVEAEDVGVYYCMQNLQTPITFGQGTRLEIK

SEQ ID NO: 4720 - protein, 9 aa, Artificial Sequence
  Description of Artificial Sequence: Synthetic peptide
MQNLQTPIT

SEQ ID NO: 4721 - skipped

SEQ ID NO: 4722 - protein, 118 aa, Artificial Sequence
  Description of Artificial Sequence: Synthetic polypeptide
QVQLVQSGAEVKKPGSSVKVSCKASGGTLTNYVVRWVRQAPGQGLEGMGGIIPVFGTTNYAQKFRGRLTITADKSTNTAYMELSGLRYEDTAVYYCARDFGGHGGAYWGQGTLVTVSS

SEQ ID NO: 4723 - protein, 11 aa, Artificial Sequence
  Description of Artificial Sequence: Synthetic peptide
ARDFGGHGGAY

SEQ ID NO: 4724 - DNA, 325 bp, Artificial Sequence
  Description of Artificial Sequence: Synthetic polynucleotide
gacatccagatgacccagtctccatcctccctgtctgcatctgtaggagacagagtcaccatcacttgccaggcgagtcaggacattaagtactatttaaattggtatcagcagaaaccagggaaagcccctaaactcctgatctacgatgcatccaatttggagacaggggtcccatcaaggttcagtggaagtggatctgggacagattttactttcaccatcagcagcctgcagcctgaagatgttgcaacatattactgtcaccagtatgataatctccctcgggacacttttggccaggggaccaagttggagatcaaac

SEQ ID NO: 4725 - protein, 108 aa, Artificial Sequence
  Description of Artificial Sequence: Synthetic polypeptide
DIQMTQSPSSLSASVGDRVTITCQASQDIKYYLNWYQQKPGKAPKLLIYDASNLETGVPSRFSGSGSGTDFTFTISSLQPEDVATYYCHQYDNLPRDTFGQGTKLEIK

SEQ ID NO: 4726 - protein, 10 aa, Artificial Sequence
  Description of Artificial Sequence: Synthetic peptide
HQYDNLPRDT

SEQ ID NO: 4727 - skipped

SEQ ID NO: 4728 - protein, 121 aa, Artificial Sequence
  Description of Artificial Sequence: Synthetic polypeptide
QVQLVESGGGVVQPGRSLRLSCAASGFTFRSYGMHWVRQAPGKGLEWVALILHNGSNKYYGESVKGRFTISRDNSKNTLYLQMNSLRAEDTAVYFCAKTSTSSGWHYFDSWGQGTLVTVSS

SEQ ID NO: 4729 - protein, 14 aa, Artificial Sequence
  Description of Artificial Sequence: Synthetic peptide
AKTSTSSGWHYFDS

SEQ ID NO: 4730 - DNA, 322 bp, Artificial Sequence
  Description of Artificial Sequence: Synthetic polynucleotide
gacatccagatgacccagtctccatcctccctgtctgcatctgtaggagacagagtcaccatcacttgccaggcgagtcaggacattaagaaatatttaagttggtatcagcagaaaccagggaaagcccctaagctcctgatctacgatgcatcaattttggagacaggggtcccatcaaggttcagtggaaatggatctgcgacagattttagtttcaccatcagcagcctacagcctgaagattttgcaacatattactgtcaacaatatgagaatctcctcttcactttcggccctgggaccaaagtggatcgcaaac

SEQ ID NO: 4731 - protein, 107 aa, Artificial Sequence
  Description of Artificial Sequence: Synthetic polypeptide
DIQMTQSPSSLSASVGDRVTITCQASQDIKKYLSWYQQKPGKAPKLLIYDASILETGVPSRFSGNGSATDFSFTISSLQPEDFATYYCQQYENLLFTFGPGTKVDRK

SEQ ID NO: 4732 - protein, 9 aa, Artificial Sequence
  Description of Artificial Sequence: Synthetic peptide
QQYENLLFT

SEQ ID NO: 4733 - skipped

SEQ ID NO: 4734 - protein, 118 aa, Artificial Sequence
  Description of Artificial Sequence: Synthetic polypeptide
QVQLVQSGAEVKKPGASVKVSCKASGYTFTSYYMHWVRQAPGQGLEWMGIINPSGGSTSYAQKFQGRVTMTRDTSTSTVYMELSSLRFEDTAVYYCARADAVAGPDYWGQGTLVTVSS

SEQ ID NO: 4735 - protein, 11 aa, Artificial Sequence
  Description of Artificial Sequence: Synthetic peptide
ARADAVAGPDY

SEQ ID NO: 4736 - DNA, 337 bp, Artificial Sequence
  Description of Artificial Sequence: Synthetic polynucleotide
gatattgtgatgacccagactccactctctctgtccgtcatcccgggacagccggcctccctctcctgcaagtctagtcagagcctcctgcatagtgatggaaagacctatttgtattggtacctgcaaaagccaggccagcctccacagctcctgatctatgaagtttccaaccggttgtctggagtgccagataggttcagtggcagcgggtcagggacagatttcacactgaaaatcagccgggtggaggctgaggatgttggcatttatcactgcatgcaaagtatacaacgcccgtacacttttggccaggggaccaagctggagatcaaac

SEQ ID NO: 4737 - protein, 112 aa, Artificial Sequence
  Description of Artificial Sequence: Synthetic polypeptide
DIVMTQTPLSLSVIPGQPASLSCKSSQSLLHSDGKTYLYWYLQKPGQPPQLLIYEVSNRLSGVPDRFSGSGSGTDFTLKISRVEAEDVGIYHCMQSIQRPYTFGQGTKLEIK

SEQ ID NO: 4738 - protein, 9 aa, Artificial Sequence
  Description of Artificial Sequence: Synthetic peptide
MQSIQRPYT

SEQ ID NO: 4739 - skipped

SEQ ID NO: 4740 - protein, 122 aa, Artificial Sequence
  Description of Artificial Sequence: Synthetic polypeptide
QVQLVQSGAEVKKPGSSVKVSCKASGGTFSNYAISWVRQAPGQGLEWMGGIIPMFGTTTYGQKFQGRVTITADESTSTAYMELSSLRSEDTAVYYCARGGLRMATISTYAHWGQGTLVTVSS

SEQ ID NO: 4741 - protein, 15 aa, Artificial Sequence
  Description of Artificial Sequence: Synthetic peptide
ARGGLRMATISTYAH

SEQ ID NO: 4742 - DNA, 346 bp, Artificial Sequence
  Description of Artificial Sequence: Synthetic polynucleotide
  modified_base (43)..(43): a, c, t, g, unknown or other
gacatcgtgatgacccagtctccagactccctggctgtgtctntgggcgagagggccaccatcaactgcaagtccagccagagtgttttttacagctccaacaataagaactatttagcttggtaccagcagaaaccaggacagcctcctaagctgctcatttactgggcatctacccgggaatccggggtccctgaccgattcagtggcagcgggtctgggacggatttcactctcaccatcagcagcctgcaggctgaagatgtggctgtttattactgtcagcaatattatagtactcctcaagcgatcaccttcggccaagggacacgactggagattaaac

SEQ ID NO: 4743 - protein, 115 aa, Artificial Sequence
  Description of Artificial Sequence: Synthetic polypeptide
  MOD_RES (15)..(15): Any amino acid
DIVMTQSPDSLAVSXGERATINCKSSQSVFYSSNNKNYLAWYQQKPGQPPKLLIYWASTRESGVPDRFSGSGSGTDFTLTISSLQAEDVAVYYCQQYYSTPQAITFGQGTRLEIK

SEQ ID NO: 4744 - protein, 11 aa, Artificial Sequence
  Description of Artificial Sequence: Synthetic peptide
QQYYSTPQAIT

SEQ ID NO: 4745 - skipped

SEQ ID NO: 4746 - protein, 122 aa, Artificial Sequence
  Description of Artificial Sequence: Synthetic polypeptide
QVQLVQSGAEVKKPGSSVKVSCKASGDTFSNYAISWVRQAPGQGLEWMGGIIPMFGTTTYGRKFKGRLTITADESTTTAYMELTSLRSEDTALYYCARGGLRMATISTYAHWGQGTLVTVSS

SEQ ID NO: 4747 - protein, 15 aa, Artificial Sequence
  Description of Artificial Sequence: Synthetic peptide
ARGGLRMATISTYAH

SEQ ID NO: 4748 - DNA, 346 bp, Artificial Sequence
  Description of Artificial Sequence: Synthetic polynucleotide
gacatcgtgatgacccagtctccagactccctggctgtgtctctgggcgagagggccacaatcaactgcaagtccagccagagtatttttcacagctccaacaataaagattacttaggttggtatcaacacaaaccaggacagcctcctaagctgctcattaactgggcatcgacccgggaatccggggtccctgaccgattcagtggcagcgggtctgggacagatttcactctcaccatcagtaacctgcagactgaagatgcggcagtttattactgtcagcaatattatagtactcctcaagcgatcacgttcggccaagggacacgactggagattaaac

SEQ ID NO: 4749 - protein, 115 aa, Artificial Sequence
  Description of Artificial Sequence: Synthetic polypeptide
DIVMTQSPDSLAVSLGERATINCKSSQSIFHSSNNKDYLGWYQHKPGQPPKLLINWASTRESGVPDRFSGSGSGTDFTLTISNLQTEDAAVYYCQQYYSTPQAITFGQGTRLEIK

SEQ ID NO: 4750 - protein, 11 aa, Artificial Sequence
  Description of Artificial Sequence: Synthetic peptide
QQYYSTPQAIT

SEQ ID NO: 4751 - skipped

SEQ ID NO: 4752 - protein, 117 aa, Artificial Sequence
  Description of Artificial Sequence: Synthetic polypeptide
QVQLVQSGAEVKKPGSSVKVSCKASGGSFRNYAFSWVRLAPGQGLEWMGQIIPFFGSPHFAQKFQGRVTITADESTSTAYMELSSLRSDDTAVYYCARDDFEVMAYWGQGTQVTVSS

SEQ ID NO: 4753 - protein, 10 aa, Artificial Sequence
  Description of Artificial Sequence: Synthetic peptide
ARDDFEVMAY

SEQ ID NO: 4754 - DNA, 337 bp, Artificial Sequence
  Description of Artificial Sequence: Synthetic polynucleotide
  modified_base (22)..(22): a, c, t, g, unknown or other
gatattgtgatgacccagactnctccagtctccttgcatgtcacccttggacagccggcctccatctcctgcaggtctagtcaaagcctcgtacacagtgatggaaacacctacttgagttggcttcaactgaggccaggccagcctccaagactcctaatttatcagatttctaaccgattctctggggtcccagacagattcagtggcagtggggcagggacagatttcacactgaaaatcagcagggtagaagctgacgatgtcggcgtttattactgcatgcaggcaacacatgggaggacgttcggccaagggaccaaggtggaaatcaaac

SEQ ID NO: 4755 - protein, 112 aa, Artificial Sequence
  Description of Artificial Sequence: Synthetic polypeptide
  MOD_RES (8)..(8): Any amino acid
DIVMTQTXPVSLHVTLGQPASISCRSSQSLVHSDGNTYLSWLQLRPGQPPRLLIYQISNRFSGVPDRFSGSGAGTDFTLKISRVEADDVGVYYCMQATHGRTFGQGTKVEIK

SEQ ID NO: 4756 - protein, 8 aa, Artificial Sequence
  Description of Artificial Sequence: Synthetic peptide
MQATHGRT

SEQ ID NO: 4757 - skipped

SEQ ID NO: 4758 - protein, 119 aa, Artificial Sequence
  Description of Artificial Sequence: Synthetic polypeptide
QVQLVQSGAEVKKPGSSVKVSCKASGGAFSDYAIFWVRQAPGQGLEWMGGIIPSFGTADYAQKFQGRVTITADESTRTVNMELSSLRSGDTAVYYCAKDGGVIAAPMYWGQGTLVTVSS

SEQ ID NO: 4759 - protein, 12 aa, Artificial Sequence
  Description of Artificial Sequence: Synthetic peptide
AKDGGVIAAPMY

SEQ ID NO: 4760 - DNA, 334 bp, Artificial Sequence
  Description of Artificial Sequence: Synthetic polynucleotide
gatattgtgatgacccagactccactctctctgtccgtcacccctggacagccggcctccatctcctgcaagtctagtcagagcctcctgcacagggacggacagacctatttgtattggtacctgcagaagccaggccagcctccacagctcctgatccatgaactatccaaccggttctctggagtgccagataggttcagtggcagcgggtcagggacagatttcacactgaaaatcagccgggtggaggctgaggatgttggggtctattactgcatgcaaagtatgctgcgtcctctgacgttcggccaagggaccaaggtggaaatca

SEQ ID NO: 4761 - protein, 111 aa, Artificial Sequence
  Description of Artificial Sequence: Synthetic polypeptide
DIVMTQTPLSLSVTPGQPASISCKSSQSLLHRDGQTYLYWYLQKPGQPPQLLIHELSNRFSGVPDRFSGSGSGTDFTLKISRVEAEDVGVYYCMQSMLRPLTFGQGTKVEI

SEQ ID NO: 4762 - protein, 9 aa, Artificial Sequence
  Description of Artificial Sequence: Synthetic peptide
MQSMLRPLT

SEQ ID NO: 4763 - skipped

SEQ ID NO: 4764 - protein, 118 aa, Artificial Sequence
  Description of Artificial Sequence: Synthetic polypeptide
QVQLVQSGAEVKKPGSSVKVSCKASGGSFSNYPFSWVRQAPGQGLEWMGDIIPIFGTADYAQKFQGRVTITADESTSTVYMELSSLRSEDTAVYYCARADAVAGPDYWGQGTLVTVSS

SEQ ID NO: 4765 - protein, 11 aa, Artificial Sequence
  Description of Artificial Sequence: Synthetic peptide
ARADAVAGPDY

SEQ ID NO: 4766 - DNA, 322 bp, Artificial Sequence
  Description of Artificial Sequence: Synthetic polynucleotide
gacatccagatgacccagtctccttccaccctgtctgcatctgtaggagacagagtcaccatcacttgccgggccagtcagagtattagtagctggttggcctggtatcagcagaaaccagggaaagcccctaagctcctgatctataaggcgtctagtttagaaagtggggtcccatcaaggttcagcggcagtggatctgggacagaattcactctcaccatcagcagcctgcagcctgatgattttgcaacttattactgcaaacagtataatagttatccgtacacttttggccaggggaccaagctggagatcaaac

SEQ ID NO: 4767 - protein, 107 aa, Artificial Sequence
  Description of Artificial Sequence: Synthetic polypeptide
DIQMTQSPSTLSASVGDRVTITCRASQSISSWLAWYQQKPGKAPKLLIYKASSLESGVPSRFSGSGSGTEFTLTISSLQPDDFATYYCKQYNSYPYTFGQGTKLEIK

SEQ ID NO: 4768 - protein, 9 aa, Artificial Sequence
  Description of Artificial Sequence: Synthetic peptide
KQYNSYPYT

SEQ ID NO: 4769 - skipped

SEQ ID NO: 4770 - protein, 125 aa, Artificial Sequence
  Description of Artificial Sequence: Synthetic polypeptide
QVQLVESGGGVVQPGRSLRLSCEVSGFTLRRYGMHWVRQAPGRGLEWVAVTWYDGSNEEYSDAVKGRFTISRDNFKNRVFLQMNSLRAEDTAVYYCARDSNAFDEVGGVNYFDRWGQGTLVTVSS

SEQ ID NO: 4771 - protein, 18 aa, Artificial Sequence
  Description of Artificial Sequence: Synthetic peptide
ARDSNAFDEVGGVNYFDR

SEQ ID NO: 4772 - DNA, 319 bp, Artificial Sequence
  Description of Artificial Sequence: Synthetic polynucleotide
gaaattgtgttgacacagtctccagccaccctgtctttgtctccaggggaaagagccaccctctcctgcagggccagtcagagtgttaatttcttagtctggtaccaacagaaacctggccaggctcccagactcctcatgtatgatacatccaacagggccactggcatcccagccaggttcagtggcagtgggtctgggacagacttcactctcaccatcagcagcctagagcctgaagattttgctgtttattactgtcagcagcgtagccactggcctctcactttcggccctgggaccaaagtcgaaatcaaac

SEQ ID NO: 4773 - protein, 106 aa, Artificial Sequence
  Description of Artificial Sequence: Synthetic polypeptide
EIVLTQSPATLSLSPGERATLSCRASQSVNFLVWYQQKPGQAPRLLMYDTSNRATGIPARFSGSGSGTDFTLTISSLEPEDFAVYYCQQRSHWPLTFGPGTKVEIK

SEQ ID NO: 4774 - protein, 9 aa, Artificial Sequence
  Description of Artificial Sequence: Synthetic peptide
QQRSHWPLT

SEQ ID NO: 4775 - skipped

SEQ ID NO: 4776 - protein, 118 aa, Artificial Sequence; identical to SEQ ID NO: 4764
  Description of Artificial Sequence: Synthetic polypeptide

SEQ ID NO: 4777 - protein, 11 aa, Artificial Sequence
  Description of Artificial Sequence: Synthetic peptide
ARADAVAGPDY

SEQ ID NO: 4778 - DNA, 337 bp, Artificial Sequence
  Description of Artificial Sequence: Synthetic polynucleotide
gatattgtgatgacccagactccactctctctgtccgtcaccccgggacagccggcctccctctcctgccagtctagtcagagcctcctgcatagtgatggaaagacctatttgtattggtacctgcaaaagccaggccagcctccacagctcctgatctatgaagtttccaaccggttgtctggagtgccagataggttcagtggcagcgggtcagggacagatttcacactgaaaatcagccgggtggaggctgaggatgttggcatttatcactgcatgcaaagtatacaccgcccgtacacttttggccaggggaccaagctggagatcaaac

SEQ ID NO: 4779 - protein, 112 aa, Artificial Sequence
  Description of Artificial Sequence: Synthetic polypeptide
DIVMTQTPLSLSVTPGQPASLSCQSSQSLLHSDGKTYLYWYLQKPGQPPQLLIYEVSNRLSGVPDRFSGSGSGTDFTLKISRVEAEDVGIYHCMQSIHRPYTFGQGTKLEIK

SEQ ID NO: 4780 - protein, 9 aa, Artificial Sequence
  Description of Artificial Sequence: Synthetic peptide
MQSIHRPYT

SEQ ID NO: 4781 - skipped

SEQ ID NO: 4782 - protein, 118 aa, Artificial Sequence
  Description of Artificial Sequence: Synthetic polypeptide
QVQLVQSGAEVKKPGSSVKVSCKASGGTFSHYAICWVRQAPGQGLEWMGAIIPAFGTATYAQKFKGRVTITADESTSTAYMEVTSLRFDDTAVFFCAREDGVGSYDSWGQGTLVTVSS

SEQ ID NO: 4783 - protein, 11 aa, Artificial Sequence
  Description of Artificial Sequence: Synthetic peptide
AREDGVGSYDS

SEQ ID NO: 4784 - DNA, 337 bp, Artificial Sequence
  Description of Artificial Sequence: Synthetic polynucleotide
gatattgtgatgactcagtctccactctccctgcccgtcgcccctggagagccggcctccatctcctgcaggtctagtcagagcctcctgcatagagatggaaacaactatttggattggtacctgcagaagccagggcagtctccacaactcctgatctatttgggttctaatcgggcctccggggtccctgacaggttcagtggcagtggatcaggcacatattttacactgaaaatcagcagagtggaggctgaggatgttggggtttattactgcatgcaagctctacaaactccccgtgtttttggccaggggaccaggctggagatcaaac

SEQ ID NO: 4785 - protein, 112 aa, Artificial Sequence
  Description of Artificial Sequence: Synthetic polypeptide
DIVMTQSPLSLPVAPGEPASISCRSSQSLLHRDGNNYLDWYLQKPGQSPQLLIYLGSNRASGVPDRFSGSGSGTYFTLKISRVEAEDVGVYYCMQALQTPRVFGQGTRLEIK

SEQ ID NO: 4786 - protein, 9 aa, Artificial Sequence
  Description of Artificial Sequence: Synthetic peptide
MQALQTPRV

SEQ ID NO: 4787 - skipped

SEQ ID NO: 4788 - protein, 120 aa, Artificial Sequence
  Description of Artificial Sequence: Synthetic polypeptide
QVQLVESGGGVVQPGRSLRLSCASSGFTFSNYGMHWVRQTPGKGLEWVANIWYDGSEKYYTDSVKGRFTISRDNSKNTLFLQMNSLRAEDTGIYYCARGRGNSYGVFDVWGQGTRVAVSS

SEQ ID NO: 4789 - protein, 13 aa, Artificial Sequence
  Description of Artificial Sequence: Synthetic peptide
ARGRGNSYGVFDV

SEQ ID NO: 4790 - DNA, 331 bp, Artificial Sequence
  Description of Artificial Sequence: Synthetic polynucleotide
cagtctgtgctgactcaggcgccctctgcctctgcctccctgggagcctcggtcaagctcacctgctctctgagcagtgggcacagcagaaacgtcatcgcatggcatcagcagcagccagagaagggccctcggtacttgatgacacttaacagtgacggcagtcacaacaggggggacgggatccctgatcgcttctcaggctccagctctggggctgagcgctacctcaccatctccagcctccagtctggggatgaggctcactattactgtcagacgtgggcctctggcattgtggttttcggcggagggaccaagctgaccgtcc

SEQ ID NO: 4791 - protein, 110 aa, Artificial Sequence
  Description of Artificial Sequence: Synthetic polypeptide
QSVLTQAPSASASLGASVKLTCSLSSGHSRNVIAWHQQQPEKGPRYLMTLNSDGSHNRGDGIPDRFSGSSSGAERYLTISSLQSGDEAHYYCQTWASGIVVFGGGTKLTV

SEQ ID NO: 4792 - protein, 9 aa, Artificial Sequence
  Description of Artificial Sequence: Synthetic peptide
QTWASGIVV

SEQ ID NO: 4793 - skipped

SEQ ID NO: 4794 - protein, 119 aa, Artificial Sequence
  Description of Artificial Sequence: Synthetic polypeptide
QVQLQESGPGLVKPSETLFLTCTVSGGSISSHYWNWIRQSPGKGLEWIGYIYNSESTRYNPSLKSRVTISADTSKNQFSLKLTSVTPADTAVYYCARDGGEWSRYFDYWGQGALVTVSS

SEQ ID NO: 4795 - protein, 13 aa, Artificial Sequence
  Description of Artificial Sequence: Synthetic peptide
ARDGGEWSRYFDY

SEQ ID NO: 4796 - DNA, 332 bp, Artificial Sequence
  Description of Artificial Sequence: Synthetic polynucleotide
cagtctgtgctgactcagccgccctcagtgtctgcggccccaggacagagggtcaccatctcctgctctggaagcaactccaacattggggaaaattttgtctcctggtaccagcagctcccacgaacagcccccagactcctcatttatgacaataataggcgcccctcaggtattcctgaccgattctctggctccaagtctggcacgtcagccaccctagtcatcaccggactccaaactggggacgaggccgattattactgcggaacatgggatagtagcctgagtcgtccttcactgttcggcggagggaccaagctgaccgtcct

SEQ ID NO: 4797 - protein, 110 aa, Artificial Sequence
  Description of Artificial Sequence: Synthetic polypeptide
QSVLTQPPSVSAAPGQRVTISCSGSNSNIGENFVSWYQQLPRTAPRLLIYDNNRRPSGIPDRFSGSKSGTSATLVITGLQTGDEADYYCGTWDSSLSRPSLFGGGTKLTV

SEQ ID NO: 4798 - protein, 12 aa, Artificial Sequence
  Description of Artificial Sequence: Synthetic peptide
GTWDSSLSRPSL

SEQ ID NO: 4799 - DNA, 367 bp, Artificial Sequence
  Description of Artificial Sequence: Synthetic polynucleotide
caggtgcagctggtggagtctgggggaggcgtggtccagcctgggaggtccctgagactctcctgtgcagcctctggattcaccttcagtagctatgctatgcactgggtccgccaggctccaggcaaggggctggagtgggtggcagttatatcatatgatggaagcaataaatactacgcagactccgtgaagggccgattcaccatctccagagacaattccaagaacacgctgtatctgcaaatgaacagcctgagagctgaggacacggctgtgtattactgtgcgagagtggcgttccgtagtggttatattaactggttcgacccctggggccagggaaccctggtcaccgtctcctcag

SEQ ID NO: 4800 - protein, 122 aa, Artificial Sequence
  Description of Artificial Sequence: Synthetic polypeptide
QVQLVESGGGVVQPGRSLRLSCAASGFTFSSYAMHWVRQAPGKGLEWVAVISYDGSNKYYADSVKGRFTISRDNSKNTLYLQMNSLRAEDTAVYYCARVAFRSGYINWFDPWGQGTLVTVSS

SEQ ID NO: 4801 - protein, 15 aa, Artificial Sequence
  Description of Artificial Sequence: Synthetic peptide
ARVAFRSGYINWFDP

SEQ ID NO: 4802 - DNA, 322 bp, Artificial Sequence
  Description of Artificial Sequence: Synthetic polynucleotide
gacatccagatgacccagtctccatcctccctgtctgcatctgtaggagacagagtcaccatcacttgccgggcgagtcagggcattagcaattatttagcctggtatcagcagaaaccagggaaagttcctaagctcctgatctatgctgcatccactttgcaatcaggggtcccatctcggttcagtggcagtggatctgggacagatttcactctcaccatcagcagcctgcagcctgaagatgttgcaacttattactgtcaaaagtataacagtgcccctaagactttcggccctgggaccaaagtggatatcaaac

SEQ ID NO: 4803 - protein, 107 aa, Artificial Sequence
  Description of Artificial Sequence: Synthetic polypeptide
DIQMTQSPSSLSASVGDRVTITCRASQGISNYLAWYQQKPGKVPKLLIYAASTLQSGVPSRFSGSGSGTDFTLTISSLQPEDVATYYCQKYNSAPKTFGPGTKVDIK

SEQ ID NO: 4804 - protein, 9 aa, Artificial Sequence
  Description of Artificial Sequence: Synthetic peptide
QKYNSAPKT

SEQ ID NO: 4805 - DNA, 372 bp, Artificial Sequence; identical to SEQ ID NO: 4433
  Description of Artificial Sequence: Synthetic polynucleotide

SEQ ID NO: 4806 - protein, 124 aa, Artificial Sequence; identical to SEQ ID NO: 4434
  Description of Artificial Sequence: Synthetic polypeptide

SEQ ID NO: 4807 - protein, 17 aa, Artificial Sequence
  Description of Artificial Sequence: Synthetic peptide
ASSEDDYDDGTYWYFDV

SEQ ID NO: 4808 - DNA, 322 bp, Artificial Sequence
  Description of Artificial Sequence: Synthetic polynucleotide
gacatccagatgacccagtctccatcttccctgtctgcatctgtaggagacagagtcaccatcacttgtcgggcgagtcaggatattaacaactggttagcctggtatcagcagaaaccagggaacgcccccaagctcctgatctctgctatttctaagtcgcaaagtggcgtcccatcaagattcagcggcagtggatctgggacaaatttcactctcaccatcagcagcctgcagccggaagatgttgcaatttactattgtcaacagtctaacactttccctcaaacttttggccaggggaccaacctggagatcaaac

SEQ ID NO: 4809 - protein, 107 aa, Artificial Sequence
  Description of Artificial Sequence: Synthetic polypeptide
DIQMTQSPSSLSASVGDRVTITCRASQDINNWLAWYQQKPGNAPKLLISAISKSQSGVPSRFSGSGSGTNFTLTISSLQPEDVAIYYCQQSNTFPQTFGQGTNLEIK

SEQ ID NO: 4810 - protein, 9 aa, Artificial Sequence
  Description of Artificial Sequence: Synthetic peptide
QQSNTFPQT

SEQ ID NO: 4811 - DNA, 361 bp, Artificial Sequence
  Description of Artificial Sequence: Synthetic polynucleotide
gaggtgcagctggtgcagtctggagcagaggtcaaaaagcccggggagtctctgaagatctcctgtaagggttctggatacagctttagcaactactggatcggctgggtgcgccagatgcccgggaaaggcctggagtggatggggatcatctatcctggtgactctgataccaaatacagcccgtccttccaaggccaggtcaccatctcagccgacaagtccatcagcaccgcctacctgcagtggagcagcctgaaggcctcggacaccgccatgttttattgtgcgagacttttacggatgcggtttagttctcttgactactgggcccagggaaccctggtcaccgtctcctcag

SEQ ID NO: 4812 - protein, 120 aa, Artificial Sequence
  Description of Artificial Sequence: Synthetic polypeptide
EVQLVQSGAEVKKPGESLKISCKGSGYSFSNYWIGWVRQMPGKGLEWMGIIYPGDSDTKYSPSFQGQVTISADKSISTAYLQWSSLKASDTAMFYCARLLRMRFSSLDYWAQGTLVTVSS

SEQ ID NO: 4813 - protein, 13 aa, Artificial Sequence
  Description of Artificial Sequence: Synthetic peptide
ARLLRMRFSSLDY

SEQ ID NO: 4814 - DNA, 340 bp, Artificial Sequence
  Description of Artificial Sequence: Synthetic polynucleotide
gacatcgtgatgacccagtctccagactccctggctgtgtctctgggcgagagggccaccatcaactgcaagtccagccagagtgttttatacagctccaacaataagaactacttagcttggtaccagcagaaaccaggacagcctcctaagctgctcatttactgggcatctacccgggaatccggggtccctgaccgattcagtggcagcgggtctgggacagatttcactctcaccatcagcagcctgcaggctgaagatgtggcagtttattactgtcagcaatattatagtactccgtggacgttcggccaagggaccaaggtggaaatcaaac

SEQ ID NO: 4815 - protein, 113 aa, Artificial Sequence
  Description of Artificial Sequence: Synthetic polypeptide
DIVMTQSPDSLAVSLGERATINCKSSQSVLYSSNNKNYLAWYQQKPGQPPKLLIYWASTRESGVPDRFSGSGSGTDFTLTISSLQAEDVAVYYCQQYYSTPWTFGQGTKVEIK

SEQ ID NO: 4816 - protein, 9 aa, Artificial Sequence
  Description of Artificial Sequence: Synthetic peptide
QQYYSTPWT

SEQ ID NO: 4817 - DNA, 372 bp, Artificial Sequence; identical to SEQ ID NO: 4433
  Description of Artificial Sequence: Synthetic polynucleotide

SEQ ID NO: 4818 - protein, 124 aa, Artificial Sequence; identical to SEQ ID NO: 4434
  Description of Artificial Sequence: Synthetic polypeptide

SEQ ID NO: 4819 - protein, 17 aa, Artificial Sequence
  Description of Artificial Sequence: Synthetic peptide
ASSEDDYDDGTYWYFDV

SEQ ID NO: 4820 - DNA, 337 bp, Artificial Sequence
  Description of Artificial Sequence: Synthetic polynucleotide
gatattgtgatgacccagactccactctctctgtccgtcacccctggacagccggcctccatctcctgcaagtctagtcagagcctcctgcatagtgatggaaagacctatttgtattggtacctgcagaagccaggccagcctccacagctcctgatctatgaagtttccaaccggttctctggagtgccagataggttcagtggcagcgggtcagggacagatttcacactgaaaatcagccgggtggaggctgaggatgttggggtttattactgcatgcaaagtatacagcttcccctcactttcggcggagggaccaaggtggagatcaaac

SEQ ID NO: 4821 - protein, 112 aa, Artificial Sequence
  Description of Artificial Sequence: Synthetic polypeptide
DIVMTQTPLSLSVTPGQPASISCKSSQSLLHSDGKTYLYWYLQKPGQPPQLLIYEVSNRFSGVPDRFSGSGSGTDFTLKISRVEAEDVGVYYCMQSIQLPLTFGGGTKVEIK

SEQ ID NO: 4822 - protein, 9 aa, Artificial Sequence
  Description of Artificial Sequence: Synthetic peptide
MQSIQLPLT

SEQ ID NO: 4823 - DNA, 355 bp, Artificial Sequence
  Description of Artificial Sequence: Synthetic polynucleotide
caggtgcagctggtgcagtctggggctgaggtggagaagcctgggtcctcggtgaaggtctcctgcaaggcttctggaggctccttcagcaactttgccatcagctgggtgcgacaggcccctggacaagggcttgagtggatgggagggatcatccctatctttggttcagcaaactacgcacagaagttccagggcagagtcacgattaccgcggacaaatccacgagcacagtctacatggagctgagcagcctgagatctgaggacacggccgtgtattactgtgcgagagaagatggcttggggagttacgactactggggccagggaaccctggtcaccgtctcctcag

SEQ ID NO: 4824 - protein, 118 aa, Artificial Sequence
  Description of Artificial Sequence: Synthetic polypeptide
QVQLVQSGAEVEKPGSSVKVSCKASGGSFSNFAISWVRQAPGQGLEWMGGIIPIFGSANYAQKFQGRVTITADKSTSTVYMELSSLRSEDTAVYYCAREDGLGSYDYWGQGTLVTVSS

SEQ ID NO: 4825 - protein, 11 aa, Artificial Sequence
  Description of Artificial Sequence: Synthetic peptide
AREDGLGSYDY

SEQ ID NO: 4826 - DNA, 340 bp, Artificial Sequence
  Description of Artificial Sequence: Synthetic polynucleotide
  modified_base (42)..(43): a, c, t, g, unknown or other
gacatcgtgatgacccagtctccagactccctggctgtgtcnntgggcgagagggccaccatcaactgcaagtccagccagagtgttttatacagctccaacaataagaactacttagcttggtaccagcagaaaccaggacagcctcctaagctgctcatttactgggcatctacccgggaatccggggtccctgaccgattcagtggcagcgggtctgggacagatttcactctcaccatcagcagcctgcaggctgaagatgtggcagtttattactgtcagcaatattatagtactccttgcactttcggcggagggaccaaggtggagatcaaac

SEQ ID NO: 4827 - protein, 113 aa, Artificial Sequence
  Description of Artificial Sequence: Synthetic polypeptide
  MOD_RES (15)..(15): Any amino acid
DIVMTQSPDSLAVSXGERATINCKSSQSVLYSSNNKNYLAWYQQKPGQPPKLLIYWASTRESGVPDRFSGSGSGTDFTLTISSLQAEDVAVYYCQQYYSTPCTFGGGTKVEIK

SEQ ID NO: 4828 - protein, 9 aa, Artificial Sequence
  Description of Artificial Sequence: Synthetic peptide
QQYYSTPCT

SEQ ID NO: 4829 - DNA, 372 bp, Artificial Sequence; identical to SEQ ID NO: 4433
  Description of Artificial Sequence: Synthetic polynucleotide

SEQ ID NO: 4830 - protein, 124 aa, Artificial Sequence; identical to SEQ ID NO: 4434
  Description of Artificial Sequence: Synthetic polypeptide

SEQ ID NO: 4831 - protein, 17 aa, Artificial Sequence
  Description of Artificial Sequence: Synthetic peptide
ASSEDDYDDGTYWYFDV

SEQ ID NO: 4832 - DNA, 325 bp, Artificial Sequence
  Description of Artificial Sequence: Synthetic polynucleotide
gaaattgtgttgacgcagtctccaggcaccctgtctttgtctccaggggaaagagccaccctctcctgcagggccagtcagagtgttagcagcagctacttagcctggtaccagcagaaacctggccaggctcccaggctcctcatctatggtgcatccagcagggccactggcatcccagacaggttcagtggcagtgggtctgggacagacttcactctcaccatcagcagactggagcctgaagattttgcagtgtattactgtcagcagtatggtagctcacctaacacttttggccaggggaccaagctggagatcaaac

SEQ ID NO: 4833 - protein, 108 aa, Artificial Sequence
  Description of Artificial Sequence: Synthetic polypeptide
EIVLTQSPGTLSLSPGERATLSCRASQSVSSSYLAWYQQKPGQAPRLLIYGASSRATGIPDRFSGSGSGTDFTLTISRLEPEDFAVYYCQQYGSSPNTFGQGTKLEIK

SEQ ID NO: 4834 - protein, 9 aa, Artificial Sequence
  Description of Artificial Sequence: Synthetic peptide
QQYGSSPNT

SEQ ID NO: 4835 - DNA, 361 bp, Artificial Sequence; identical to SEQ ID NO: 2273
  Description of Artificial Sequence: Synthetic polynucleotide

SEQ ID NO: 4836 - protein, 120 aa, Artificial Sequence; identical to SEQ ID NO: 61
  Description of Artificial Sequence: Synthetic polypeptide

SEQ ID NO: 4837 - protein, 13 aa, Artificial Sequence
  Description of Artificial Sequence: Synthetic peptide
AKTAGNLFGVVVI

SEQ ID NO: 4838 - DNA, 325 bp, Artificial Sequence
  Description of Artificial Sequence: Synthetic polynucleotide
gaaatagtgatgacgcagtctccagccaccctgtctgtgtctccaggggaaagagccaccctctcctgcagggccagtcagagtgttaacaacaatttagcctggtaccagcagaaacctggccaggctcccagactcctcatctatggtgcatctactagggccactggtatcccagccaggttcagtggcagtgggtctgggacagagttcactctcaccatcagcagcctgcagtctgaagactttgcaatttattactgtcagcagtataatcagtggcctccgctcactttcggcggagggaccaaggtggagatcaaac

SEQ ID NO: 4839 - protein, 108 aa, Artificial Sequence
  Description of Artificial Sequence: Synthetic polypeptide
EIVMTQSPATLSVSPGERATLSCRASQSVNNNLAWYQQKPGQAPRLLIYGASTRATGIPARFSGSGSGTEFTLTISSLQSEDFAIYYCQQYNQWPPLTFGGGTKVEIK

SEQ ID NO: 4840 - protein, 10 aa, Artificial Sequence
  Description of Artificial Sequence: Synthetic peptide
QQYNQWPPLT

SEQ ID NO: 4841 - DNA, 372 bp, Artificial Sequence; identical to SEQ ID NO: 4433
  Description of Artificial Sequence: Synthetic polynucleotide

SEQ ID NO: 4842 - protein, 124 aa, Artificial Sequence; identical to SEQ ID NO: 4434
  Description of Artificial Sequence: Synthetic polypeptide

SEQ ID NO: 4843 - protein, 17 aa, Artificial Sequence
  Description of Artificial Sequence: Synthetic peptide
ASSEDDYDDGTYWYFDV

SEQ ID NO: 4844 - DNA, 314 bp, Artificial Sequence
  Description of Artificial Sequence: Synthetic polynucleotide
gacatccagttgacccagtctccatccttcctgtctgcatctgtaggggacagagtcaccatcacttgccgggccagtcagagcattaacacttatttagcctggtatcaacaaagaccagggaaggcccctaacctcttgatctttgctgcatccactttgcaaaatggggtcccatcaaggttcagcggcagtagatctgaatctgggacagaattcactctcacaatcagcagcctgcagcctgaagattttgcttcttattactgtcaactactgtgggcgttcggccaagggaccaaggtggaaatcaa

SEQ ID NO: 4845 - protein, 104 aa, Artificial Sequence
  Description of Artificial Sequence: Synthetic polypeptide
DIQLTQSPSFLSASVGDRVTITCRASQSINTYLAWYQQRPGKAPNLLIFAASTLQNGVPSRFSGSRSESGTEFTLTISSLQPEDFASYYCQLLWAFGQGTKVEI

SEQ ID NO: 4846 - protein, 5 aa, Artificial Sequence
  Description of Artificial Sequence: Synthetic peptide
QLLWA

SEQ ID NO: 4847 - DNA, 361 bp, Artificial Sequence; identical to SEQ ID NO: 2111
  Description of Artificial Sequence: Synthetic polynucleotide

SEQ ID NO: 4848 - protein, 120 aa, Artificial Sequence; identical to SEQ ID NO: 2112
  Description of Artificial Sequence: Synthetic polypeptide

SEQ ID NO: 4849 - protein, 13 aa, Artificial Sequence
  Description of Artificial Sequence: Synthetic peptide
ARDVASNYAYFDL

SEQ ID NO: 4850 - DNA, 325 bp, Artificial Sequence
  Description of Artificial Sequence: Synthetic polynucleotide
gaaattgtgttgacgcagtctccaggcaccctgtctttgtctccaggggaaagagccaccctctcctgcagggccagtcagagtgttagcagcagctacttagcctggtaccagcagaaacctggccaggctcccaggctcctcatctatggtgcatccagcagggccactggcatcccagacaggttcagtggcagtgggtctgggacagacttcactctcaccatcagcagactggagcctgaagattttgcagtgtattactgtcagcagtatggtagctcacctcgaacgttcggccaagggaccaaggtggaaatcaaac

SEQ ID NO: 4851 - protein, 108 aa, Artificial Sequence
  Description of Artificial Sequence: Synthetic polypeptide
EIVLTQSPGTLSLSPGERATLSCRASQSVSSSYLAWYQQKPGQAPRLLIYGASSRATGIPDRFSGSGSGTDFTLTISRLEPEDFAVYYCQQYGSSPRTFGQGTKVEIK

SEQ ID NO: 4852 - protein, 9 aa, Artificial Sequence
  Description of Artificial Sequence: Synthetic peptide
QQYGSSPRT

SEQ ID NO: 4853 - DNA, 390 bp, Artificial Sequence
  Description of Artificial Sequence: Synthetic polynucleotide
gaggtgcagctggtggagtctgggggaggcttggtccagcctggagggtccctgagactctcctgtgcagcctctggattcatcttcagtgactattacatggactgggtccgccaggctccagggaaggggctggagtgggttggccgtattagaaacaaagctagcagttacaccacagaatacgccgtgtttgtgaaaggcagattcaccatgtcaagagacgattcaaaaaactcactgtatctgcaaatggacagcctggaaaccgacgacacggccgtctattactgtgctagagagggccgtgacaattggggtccagtgacgaacttctactactacggtttggacgtctggggccaagggaccacggtcaccgtctcctca

SEQ ID NO: 4854 - protein, 130 aa, Artificial Sequence
  Description of Artificial Sequence: Synthetic polypeptide
EVQLVESGGGLVQPGGSLRLSCAASGFIFSDYYMDWVRQAPGKGLEWVGRIRNKASSYTTEYAVFVKGRFTMSRDDSKNSLYLQMDSLETDDTAVYYCAREGRDNWGPVTNFYYYGLDVWGQGTTVTVSS

SEQ ID NO: 4855 - protein, 21 aa, Artificial Sequence
  Description of Artificial Sequence: Synthetic peptide
AREGRDNWGPVTNFYYYGLDV

SEQ ID NO: 4856 - DNA, 322 bp, Artificial Sequence
  Description of Artificial Sequence: Synthetic polynucleotide
gacatccagatgacccagtctccatcctccctgtctgcatctgtaggagacagagtcaccatcacttgccgggcaagtcagagcattagcagctatttaaattggtatcagcagaaaccagggaaagcccctaagctcctgatctatgctgcatccagtttgcaaagtggggtcccatcaaggttcagtggcagtggatctgggacagatttcactctcaccatcagcagtctgcaacctgaagattttgcaacttactactgtcaacagagttacagtacccctcagacgttcggccaagggaccaaggtggaaatcaaac

SEQ ID NO: 4857 - protein, 107 aa, Artificial Sequence
  Description of Artificial Sequence: Synthetic polypeptide
DIQMTQSPSSLSASVGDRVTITCRASQSISSYLNWYQQKPGKAPKLLIYAASSLQSGVPSRFSGSGSGTDFTLTISSLQPEDFATYYCQQSYSTPQTFGQGTKVEIK

SEQ ID NO: 4858 - protein, 9 aa, Artificial Sequence
  Description of Artificial Sequence: Synthetic peptide
QQSYSTPQT

SEQ ID NO: 4859 - DNA, 370 bp, Artificial Sequence
  Description of Artificial Sequence: Synthetic polynucleotide
cagctgcagctgcaggagtccggctcaggactggtgaagccttcacagaccctgtccctcacctgcgctgtctctggtgactccatcagtagtggtggttactcctggagctggatccggcagtcaccagggaagggcctggagtggattggatacatctatcagagttggaccaggtactacaacccgtccctcagcagtcgagtcaccatttcagcagacacgtccaagaaccagttctccatgaacctgacctctgtgaccgccgcggacacggccgtctattactgtgccagaggcgtttatgatgatagtggttatcccctggttgactcgtggggccagggaaccctggtcaccgtctcctcag

SEQ ID NO: 4860 - protein, 123 aa, Artificial Sequence
  Description of Artificial Sequence: Synthetic polypeptide
QLQLQESGSGLVKPSQTLSLTCAVSGDSISSGGYSWSWIRQSPGKGLEWIGYIYQSWTRYYNPSLSSRVTISADTSKNQFSMNLTSVTAADTAVYYCARGVYDDSGYPLVDSWGQGTLVTVSS

SEQ ID NO: 4861 - protein, 15 aa, Artificial Sequence
  Description of Artificial Sequence: Synthetic peptide
ARGVYDDSGYPLVDS

SEQ ID NO: 4862 - DNA, 337 bp, Artificial Sequence
  Description of Artificial Sequence: Synthetic polynucleotide
gatattgtgatgactcagtctccactctccctgcccgtcacccctggagagccggcctccatctcctgcaggtctagtcagagcctcctgcatagtaatggatacaactatttggattggtacctgcagaagccagggcagtctccacagctcctgatctatttgggttctaatcgggcctccggggtccctgacaggttcagtggcagtggatcaggcacagattttacactgaaaatcagcagagtggaggctgaggatgttggggtttattactgcatgcaagctctacaaactcctcggacttttggccaggggaccaagctggagatcaaac

SEQ ID NO: 4863 - protein, 112 aa, Artificial Sequence
  Description of Artificial Sequence: Synthetic polypeptide
DIVMTQSPLSLPVTPGEPASISCRSSQSLLHSNGYNYLDWYLQKPGQSPQLLIYLGSNRASGVPDRFSGSGSGTDFTLKISRVEAEDVGVYYCMQALQTPRTFGQGTKLEIK

SEQ ID NO: 4864 - protein, 9 aa, Artificial Sequence
  Description of Artificial Sequence: Synthetic peptide
MQALQTPRT

SEQ ID NO: 4865 - DNA, 363 bp, Artificial Sequence
  Description of Artificial Sequence: Synthetic polynucleotide
caggtgcagctggtggagtctgggggacgagtggtcaagccgggggggtccctcagactctcctgtgcagcgtctggtttcagcttcagtgactatggcctacactgggtccgccagactccaggcaaggggctggagtgggtggcattcattcactatgacgggagtaggcaatactacgcagagtccgtgaggggccggttcaccatctccagagacaatgcccaggagacgctgcatctgcaaatgaacagcctgacaactgaggactcctctatttattactgtgcgaagggggttcatacttactactactacgctatggacgtctggggccaagggaccagggtcaccgtctcctca

SEQ ID NO: 4866 - protein, 121 aa, Artificial Sequence
  Description of Artificial Sequence: Synthetic polypeptide
QVQLVESGGRVVKPGGSLRLSCAASGFSFSDYGLHWVRQTPGKGLEWVAFIHYDGSRQYYAESVRGRFTISRDNAQETLHLQMNSLTTEDSSIYYCAKGVHTYYYYAMDVWGQGTRVTVSS

SEQ ID NO: 4867 - protein, 14 aa, Artificial Sequence
  Description of Artificial Sequence: Synthetic peptide
AKGVHTYYYYAMDV

SEQ ID NO: 4868 - DNA, 319 bp, Artificial Sequence
  Description of Artificial Sequence: Synthetic polynucleotide
gacatccagatgacccagtctccttccaccctgtctgcatctgtaggagacagagtcaccatcacttgccgggccagtcagagtattagtagctggttggcctggtatcagcagaaaccagggaaagcccctaaactcctgatctataaggcgtctagtttagaaagtggggtcccatcaaggttcagcggcagtggatctgggacagaattcactctcaccatcagcagcctgcagcctgatgattttgcaacttattactgccaacagtatgatagttattggacgttcggccaagggaccaaggtggaaatcaaac

SEQ ID NO: 4869 - protein, 106 aa, Artificial Sequence
  Description of Artificial Sequence: Synthetic polypeptide
DIQMTQSPSTLSASVGDRVTITCRASQSISSWLAWYQQKPGKAPKLLIYKASSLESGVPSRFSGSGSGTEFTLTISSLQPDDFATYYCQQYDSYWTFGQGTKVEIK

SEQ ID NO: 4870 - protein, 8 aa, Artificial Sequence
  Description of Artificial Sequence: Synthetic peptide
QQYDSYWT

SEQ ID NO: 4871 - DNA, 372 bp, Artificial Sequence; identical to SEQ ID NO: 4433
  Description of Artificial Sequence: Synthetic polynucleotide

SEQ ID NO: 4872 - protein, 124 aa, Artificial Sequence; identical to SEQ ID NO: 4434
  Description of Artificial Sequence: Synthetic polypeptide

SEQ ID NO: 4873 - protein, 17 aa, Artificial Sequence
  Description of Artificial Sequence: Synthetic peptide
ASSEDDYDDGTYWYFDV

SEQ ID NO: 4874 - DNA, 331 bp, Artificial Sequence
  Description of Artificial Sequence: Synthetic polynucleotide
cagtctgtgctgactcagccgccctcagtgtctgcggccccaggacagaaggtcaccatctcctgctctggaagcggctccaatgttgggaataatgatgtatcctggtaccaccacctcccaggaacagcccccaaactcctcatttatgacacgaataagcgaccctcaggaattcctgaccggttctctggctccaggtctggcacgtcagccaccctggacatcaccggactccagactggggacgaggccgattattactgcggcacatgggacatcagcctgagtgctgcggtgttcggcggagggaccaaactgaccgtcctag

SEQ ID NO: 4875 - protein, 110 aa, Artificial Sequence
  Description of Artificial Sequence: Synthetic polypeptide
QSVLTQPPSVSAAPGQKVTISCSGSGSNVGNNDVSWYHHLPGTAPKLLIYDTNKRPSGIPDRFSGSRSGTSATLDITGLQTGDEADYYCGTWDISLSAAVFGGGTKLTVL

SEQ ID NO: 4876 - protein, 11 aa, Artificial Sequence
  Description of Artificial Sequence: Synthetic peptide
GTWDISLSAAV

SEQ ID NO: 4877 - DNA, 364 bp, Artificial Sequence
  Description of Artificial Sequence: Synthetic polynucleotide
gaggtgcagctggtgcagtctggagcagaggtaaaaaagcccggagagtctctgaagatctcctgtaaggtttctggatacaactttgccacctactggatcggctgggtgcgccagatgcccgggaaaggcctggagtggatggggatcatctggcctggtgactctgataccagatacagttcgtccttcgaaggccaggtcaccatctcagtcgacgagtctaccagtagtacctacctgcagtggaacagcctgaaggcctcggacaccgccatgtattattgtgcgagagtcgaggtgacaagagatgcattctacttcgacccctggggccagggaaccctggtcaccgtctcctcag

SEQ ID NO: 4878 - protein, 121 aa, Artificial Sequence
  Description of Artificial Sequence: Synthetic polypeptide
EVQLVQSGAEVKKPGESLKISCKVSGYNFATYWIGWVRQMPGKGLEWMGIIWPGDSDTRYSSSFEGQVTISVDESTSSTYLQWNSLKASDTAMYYCARVEVTRDAFYFDPWGQGTLVTVSS

SEQ ID NO: 4879 - protein, 14 aa, Artificial Sequence
  Description of Artificial Sequence: Synthetic peptide
ARVEVTRDAFYFDP

SEQ ID NO: 4880 - DNA, 319 bp, Artificial Sequence
  Description of Artificial Sequence: Synthetic polynucleotide
tcctatgtgctgactcagccaccctcagtgtccgtgtccccaggacagacagccagcatcacctgctctggagataaattgggggataaatatgcttgctggtatcagcagaagccaggccagtcccctgtgctggtcatctatcaagatagcaagcggccctcagggatccctgagcgattctctggctccaactctgggaacacagccactctgaccatcagcgggacccaggctatggatgaggctgactattactgtcaggcgtgggacagcagcactgcaaacttcggaactgggaccaaggtcaccgtcctag

SEQ ID NO: 4881 - protein, 106 aa, Artificial Sequence
  Description of Artificial Sequence: Synthetic polypeptide
SYVLTQPPSVSVSPGQTASITCSGDKLGDKYACWYQQKPGQSPVLVIYQDSKRPSGIPERFSGSNSGNTATLTISGTQAMDEADYYCQAWDSSTANFGTGTKVTVL

SEQ ID NO: 4882 - protein, 9 aa, Artificial Sequence
  Description of Artificial Sequence: Synthetic peptide
QAWDSSTAN

SEQ ID NO: 4883 - DNA, 389 bp, Artificial Sequence
  Description of Artificial Sequence: Synthetic polynucleotide
gaggtgcagctggtggagtctgggggaggcttggtccagcctggagggtccctgagactctcctgtgcagcctctggattcgttttcagtgaccattacatggactgggtccgccaggctccagggaaggggctggagtgggttggccgcatcagaaacaaagctgcctcctacaccgcagaatacgccgcgtttgtgaaaggcagattcaccctgttaagagacgattcacagaatttactgtctctgcaaatggacaacctcgaaaccgacgacacggccgtctattactgtactcgagagggccgtgacaaatggggtccagtgacgaacttctactactacggtctggacgtctggggccaagggaccacggtcaccgtctcctc

SEQ ID NO: 4884 - protein, 129 aa, Artificial Sequence
  Description of Artificial Sequence: Synthetic polypeptide
EVQLVESGGGLVQPGGSLRLSCAASGFVFSDHYMDWVRQAPGKGLEWVGRIRNKAASYTAEYAAFVKGRFTLLRDDSQNLLSLQMDNLETDDTAVYYCTREGRDKWGPVTNFYYYGLDVWGQGTTVTVS

SEQ ID NO: 4885 - protein, 21 aa, Artificial Sequence
  Description of Artificial Sequence: Synthetic peptide
TREGRDKWGPVTNFYYYGLDV

SEQ ID NO: 4886 - DNA, 331 bp, Artificial Sequence
  Description of Artificial Sequence: Synthetic polynucleotide
cagtctgtgctgactcagtcgccctcagtgtctgcggccccaggacagaaggtcaccatctcctgctctggaagcagctccaacattgggaataattatgtatcctggtaccagcacctcccaggaacagcccccaaactcctcatttatgacaataataagcgaccctcagggattcctgaccgattctctggctccaagtctggcacgtcagccaccctgggcatcaccggactccagactggggacgaggccgattattactgcggaacatgggatggcagcctgagtattgtggtgttcggcggagggaccaagctgaccgtcctag

SEQ ID NO: 4887 - protein, 110 aa, Artificial Sequence
  Description of Artificial Sequence: Synthetic polypeptide
QSVLTQSPSVSAAPGQKVTISCSGSSSNIGNNYVSWYQHLPGTAPKLLIYDNNKRPSGIPDRFSGSKSGTSATLGITGLQTGDEADYYCGTWDGSLSIVVFGGGTKLTVL

SEQ ID NO: 4888 - protein, 11 aa, Artificial Sequence
  Description of Artificial Sequence: Synthetic peptide
GTWDGSLSIVV

SEQ ID NO: 4889 - DNA, 367 bp, Artificial Sequence
  Description of Artificial Sequence: Synthetic polynucleotide
gaggtgcagctgttggagtctgggggaggcctggtacagcctggggggtccctgagactctcctgtgcagcctctggattcacctttagcgactttgccatgagctgggtccgccaggctccagggaaggggctgcagtgggtctcgggtattagtggcagtggtcgtatcacataccacgcagactccgtgaagggccggttcaccatctccagagacaattccaagaagactctgtttctgcaaatgatcagcctgagagccgaggacacggccttatattactgtgcaaaagatcatgccggtgacttttcccagaatccttttgatatctggggccaagggacaatggtcaccgtctcttcag

SEQ ID NO: 4890 - protein, 122 aa, Artificial Sequence
  Description of Artificial Sequence: Synthetic polypeptide
EVQLLESGGGLVQPGGSLRLSCAASGFTFSDFAMSWVRQAPGKGLQWVSGISGSGRITYHADSVKGRFTISRDNSKKTLFLQMISLRAEDTALYYCAKDHAGDFSQNPFDIWGQGTMVTVSS

SEQ ID NO: 4891 - protein, 15 aa, Artificial Sequence
  Description of Artificial Sequence: Synthetic peptide
AKDHAGDFSQNPFDI

SEQ ID NO: 4892 - DNA, 337 bp, Artificial Sequence
  Description of Artificial Sequence: Synthetic polynucleotide
cagtctgccctgactcagcctgcctccgtgtctgggtctcctggacagtcgatcaccatctcctgcactggaaccagcagtgacgttggtggttataactatgtctcctggtaccaacaacacccaggcaaagcccccaaactcatgatttatgatgtcagtaatcggccctcaggggtttctaatcgcttctctggctccaagtctggcaacacggcctccctgaccatctctgggctccaggctgaggacgaggctgattattactgcagctcatatacaagcagcagcactcttaattgggtgttcggcggagggaccaagctgaccgtcctag

SEQ ID NO: 4893 - protein, 112 aa, Artificial Sequence
  Description of Artificial Sequence: Synthetic polypeptide
QSALTQPASVSGSPGQSITISCTGTSSDVGGYNYVSWYQQHPGKAPKLMIYDVSNRPSGVSNRFSGSKSGNTASLTISGLQAEDEADYYCSSYTSSSTLNWVFGGGTKLTVL

SEQ ID NO: 4894 - protein, 12 aa, Artificial Sequence
  Description of Artificial Sequence: Synthetic peptide
SSYTSSSTLNWV

SEQ ID NO: 4895 - DNA, 372 bp, Artificial Sequence; identical to SEQ ID NO: 4433
  Description of Artificial Sequence: Synthetic polynucleotide

SEQ ID NO: 4896 - protein, 124 aa, Artificial Sequence; identical to SEQ ID NO: 4434
  Description of Artificial Sequence: Synthetic polypeptide

SEQ ID NO: 4897 - protein, 17 aa, Artificial Sequence
  Description of Artificial Sequence: Synthetic peptide
ASSEDDYDDGTYWYFDV

SEQ ID NO: 4898 - DNA, 331 bp, Artificial Sequence
  Description of Artificial Sequence: Synthetic polynucleotide
cagtctgtgctgactcagccgccctcagtgtctggggccccagggcagacggtcaccatctcctgcactgggagcagctccaacatcggggcaggttttgatgtacagtggtaccaacaacttccaggaacagcccccaaactcctcatctatggcaccgtcaatcggccctcaggggtccctgaccgcttctctgcgtccaagtctggctcctcagcctccctggccatcagtgggctccgggctgacgatgaggctgattattactgtcaatcctatgacaactccctgagtgctgtgttcggcggcgggaccacactgaccgtcttag

SEQ ID NO: 4899 - protein, 110 aa, Artificial Sequence
  Description of Artificial Sequence: Synthetic polypeptide
QSVLTQPPSVSGAPGQTVTISCTGSSSNIGAGFDVQWYQQLPGTAPKLLIYGTVNRPSGVPDRFSASKSGSSASLAISGLRADDEADYYCQSYDNSLSAVFGGGTTLTVL

SEQ ID NO: 4900 - protein, 10 aa, Artificial Sequence
  Description of Artificial Sequence: Synthetic peptide
QSYDNSLSAV

SEQ ID NO: 4901 - DNA, 364 bp, Artificial Sequence
  Description of Artificial Sequence: Synthetic polynucleotide
gaggtgcagctggtggagtctgggggaggcttggtccagcctggggggtccctgagactctcctgtgcagcctctggattcacctttggtagacattggatgagctgggtccgccaggctccagggaaggggccggagtgggtggccaacattaaacaagatggaactgagaaaaactatttggactctgtgaagggccgattcaccatctccagagacaacgccaagaggtcactgtttctgcaaatgaacagcctgagaatcgaggacacggccgtgtattattgtgcgagagaggggctagcagcaggggcgtactactttgactactggggccagggaaccctggccaccgtctcctcag

SEQ ID NO: 4902 - protein, 121 aa, Artificial Sequence
  Description of Artificial Sequence: Synthetic polypeptide
EVQLVESGGGLVQPGGSLRLSCAASGFTFGRHWMSWVRQAPGKGPEWVANIKQDGTEKNYLDSVKGRFTISRDNAKRSLFLQMNSLRIEDTAVYYCAREGLAAGAYYFDYWGQGTLATVSS

SEQ ID NO: 4903 - protein, 14 aa, Artificial Sequence
  Description of Artificial Sequence: Synthetic peptide
AREGLAAGAYYFDY

SEQ ID NO: 4904 - DNA, 331 bp, Artificial Sequence
  Description of Artificial Sequence: Synthetic polynucleotide
cagtctgtgctgactcagccaccctcagcgtctgggacccccgggcagagggtcaccatctcttgttctggaagcagctccaacatcggaagtaatactgtaaactggtaccagcagctcccaggaacggcccccaaactcctcatctatagtgataatcagcggccctcaggggtccctgaccgattctctgtctccaagtctggcacctcagcctccctggccatcagtgggctccactctgaggatgaggctgattatgactgtgcagcatgggatgacagcctgaatggttgggtgttcggcggagggaccaagctgaccgtcctag

SEQ ID NO: 4905 - protein, 110 aa, Artificial Sequence
  Description of Artificial Sequence: Synthetic polypeptide
QSVLTQPPSASGTPGQRVTISCSGSSSNIGSNTVNWYQQLPGTAPKLLIYSDNQRPSGVPDRFSVSKSGTSASLAISGLHSEDEADYDCAAWDDSLNGWVFGGGTKLTVL

SEQ ID NO: 4906 - protein, 11 aa, Artificial Sequence
  Description of Artificial Sequence: Synthetic peptide
AAWDDSLNGWV

SEQ ID NO: 4907 - DNA, 337 bp, Artificial Sequence
  Description of Artificial Sequence: Synthetic polynucleotide
tctggggctgaggtgaagaagcctgggtcctcggtgaaggtctcctgcaaggcttctggaggcaccttcagcaactttgctatcagctgggtacgacaggcccctggacaagggcttgagtggatgggagagatcatccctttctttggcacagcaaaattcgcacagaaatttcagggcagagtcacaattaccgcggacgaatccacgagcacaggctacatggagctgagcaacctgagatctcacgacacggccgtatattactgtgcgagagatggtggaatggggagttttgactactggggccagggaaccctggtcaccgtctcctcag

SEQ ID NO: 4908 - DNA, 355 bp, Artificial Sequence; identical to SEQ ID NO: 275
  Description of Artificial Sequence: Synthetic polynucleotide

SEQ ID NO: 4909 - protein, 11 aa, Artificial Sequence
  Description of Artificial Sequence: Synthetic peptide
ARDGGMGSFDY

SEQ ID NO: 4910 - DNA, 308 bp, Artificial Sequence
  Description of Artificial Sequence: Synthetic polynucleotide
cctgcccgtcacccctggagagccggcctccatttcctgcaggtctagtcagagcctcctgcacagaagtggagacaactatttggattggtacctgcagaagccagggcagtctccacagctcctgatctatttgggttctaaccgggcctccggggtccctgacaggttcagtggcagtggatcaggcacagattttacattgaaaatcaccagagtggaggctgaggatgttggggtttattactgcatgcaagctctacaaactcctcgaacttttggccaggggaccaagctggagatcaaac

SEQ ID NO: 4911 - DNA, 337 bp, Artificial Sequence; identical to SEQ ID NO: 278
  Description of Artificial Sequence: Synthetic polynucleotide

SEQ ID NO: 4912 - protein, 9 aa, Artificial Sequence
  Description of Artificial Sequence: Synthetic peptide
MQALQTPRT

SEQ ID NO: 4913 - DNA, 332 bp, Artificial Sequence
  Description of Artificial Sequence: Synthetic polynucleotide
gctgaggtgaagaagcctgggtcctcgctgaaagtctcctgcaaggcttctggatacaccttcagcaactatgaaatcacctgggtgcgacaggcccctggacaaggacttgagtggatgggagggatcatccctgtctttggcacagccaattacgcaccgaagttccagggaagagtcacgattaccgcggacgaatccacgaccacagcctacatggaggtacgaagcctgaagtctgaagacacggccgtgtattactgtgcgagagattctggtgcaacgcactcctttgacgactggggccagggaaccctggtcaccgtctcctc

SEQ ID NO: 4914 - DNA, 356 bp, Artificial Sequence; identical to SEQ ID NO: 413
  Description of Artificial Sequence: Synthetic polynucleotide

SEQ ID NO: 4915 - protein, 12 aa, Artificial Sequence
  Description of Artificial Sequence: Synthetic peptide
ARDSGATHSFDD

SEQ ID NO: 4916 - DNA, 309 bp, Artificial Sequence
  Description of Artificial Sequence: Synthetic polynucleotide
cctgccccgtcacccctggagagccggcctccatctcctgcaggtctagtcagagcctcttgcatagaagcggatacatctatttggattggtacctccagaagccagggcagtctccacagctcctgatctatttgggttctagtcgggcctccggggtccctgacaggttcagtggcagtgcatcaggcacagattttacactgaaaatcagcagagtggaggctgaggatattggggtttattactgcaggcaaggtctacaaactccgtacacttttggccaggggaccaagctggagatcaaac

SEQ ID NO: 4917 - DNA, 337 bp, Artificial Sequence; identical to SEQ ID NO: 416
  Description of Artificial Sequence: Synthetic polynucleotide

SEQ ID NO: 4918 - protein, 9 aa, Artificial Sequence
  Description of Artificial Sequence: Synthetic peptide
RQGLQTPYT

SEQ ID NO: 4919 - DNA, 348 bp, Artificial Sequence
  Description of Artificial Sequence: Synthetic polynucleotide
agctggtgcagtctgggactgaggtgaagaagcctgggtcctcggtgaaggtctcttgcagggcttctggaggcaccttcagcaactatgctatcagctgggtgcgacaggcccctggacaagggcttaagtggatgggagggatcatccctgtctgggcttcagcaacgtacgctcagatcttccagggcagactcacgattaccgcggacgaatccacgactacagcctacatggagttgagcagcctgagatctgaggacacgggcttttattactgtgcgagagaggggggaagtgggagctacgactactggggccagggaaccctggtcatcgtctcctcag

SEQ ID NO: 4920 - DNA, 355 bp, Artificial Sequence; identical to SEQ ID NO: 665
  Description of Artificial Sequence: Synthetic polynucleotide

SEQ ID NO: 4921 - protein, 11 aa, Artificial Sequence
  Description of Artificial Sequence: Synthetic peptide
AREGGSGSYDY

SEQ ID NO: 4922 - DNA, 329 bp, Artificial Sequence
  Description of Artificial Sequence: Synthetic polynucleotide
  modified_base (18)..(18): a, c, t, g, unknown or other
tgatgactcagtctccantctccctgcccgtcacccctggagagccggcctccatctcctgtaggtctagtcagagcctcctgcatagagatggatacaactatctggattggtacctgcagaggccagggcagtctccacagctcctgatctatttggcttctaatcgggcctccggggtccctgacaggttcagtggcagtggatcaggcacagattttacactgaaaatcagcagagtggaggctgaggatgttggggtttattactgcatgcaagctctgcgaactcctcgagcttttggccaggggaccaagctggagatcaaa

SEQ ID NO: 4923 - DNA, 336 bp, Artificial Sequence; identical to SEQ ID NO: 668
  Description of Artificial Sequence: Synthetic polynucleotide
  modified_base (25)..(25): a, c, t, g, unknown or other

SEQ ID NO: 4924 - protein, 9 aa, Artificial Sequence
  Description of Artificial Sequence: Synthetic peptide
MQALRTPRA

SEQ ID NO: 4925 - DNA, 340 bp, Artificial Sequence
  Description of Artificial Sequence: Synthetic polynucleotide
cagtctggggctgaggtgaagaagcctgggtcctcggtgaaagtctcctgcaaggcttctggaggcacctttagcaactatgctatcgactgggtgcgacaggcccctggacaagggcttgagtggatgggacggatcatccctgtctttggcacaccaaattacgctaagaagttccagggcagagccacgattaccgcggacgagtccgcgagtacagcctacatggaactgagcagcctgagatctgaggacacggccgtcttctattgtgcgagagtggggggtttggggagttatgacgactggggccagggaaccctggtcaccgtctcctcag

SEQ ID NO: 4926 - DNA, 355 bp, Artificial Sequence; identical to SEQ ID NO: 707
  Description of Artificial Sequence: Synthetic polynucleotide

SEQ ID NO: 4927 - protein, 11 aa, Artificial Sequence
  Description of Artificial Sequence: Synthetic peptide
ARVGGLGSYDD

SEQ ID NO: 4928 - DNA, 309 bp, Artificial Sequence
  Description of Artificial Sequence: Synthetic polynucleotide
  modified_base (12)..(12): a, c, t, g, unknown or other
cctgccccgtcncccctggagagccagcctccatctcctgcaggtctagtcagagcctcctgcatcgtgatgggaacaactatttggattggtacctgcagaagccagggcagtctccacagctcctgatctatttgggttctaatcgggcctccggagtccctgacaggttcagtggcagtggatcaggcacagattttacactgaaaatcagcagagtggaggctgaggatgttggagtttattattgcatgcaagctctacaaattcctaacacttttggccaggggaccaagctggaaatcaaac

SEQ ID NO: 4929 - DNA, 337 bp, Artificial Sequence; identical to SEQ ID NO: 710
  Description of Artificial Sequence: Synthetic polynucleotide
  modified_base (40)..(40): a, c, t, g, unknown or other

SEQ ID NO: 4930 - protein, 9 aa, Artificial Sequence
  Description of Artificial Sequence: Synthetic peptide
MQALQIPNT

SEQ ID NO: 4931 - DNA, 340 bp, Artificial Sequence
  Description of Artificial Sequence: Synthetic polynucleotide
cagtctggggctgaggtgaagaagcctggatcctcggtgaaggtctcctgcaagagttctggaggcaccttcagcaactttgcaatccactgggtgcggcaggcccctggacaagggcttgagtggatgggaggaattatccctgtctttggtacaccaaacttcgcacagaagttccagggcagagtcacgattaccgcggacgaatccacgagcacagcctacatggagctgagcagcctgagatctgaggacacggccatgtatttttgtgcgagagaggattggagtgcctcttttgactcctggggccagggaaccctggtcaccgtctcttcag

SEQ ID NO: 4932 - DNA, 355 bp, Artificial Sequence; identical to SEQ ID NO: 845
  Description of Artificial Sequence: Synthetic polynucleotide

SEQ ID NO: 4933 - protein, 11 aa, Artificial Sequence
  Description of Artificial Sequence: Synthetic peptide
AREDWSASFDS

SEQ ID NO: 4934 - DNA, 305 bp, Artificial Sequence
  Description of Artificial Sequence: Synthetic polynucleotide
  modified_base (10)..(10): a, c, t, g, unknown or other
tgccccgtcncccctggagagccggcctccatctcctgcaggtctagtcagagcctcctgcatagagatggatacaactatttgcattggtacctgcagaagccagggcagtctccacagctcctgatttttttggcttctaatcgggcctccggggtccctgacaggttcagtggcagtggatcaggcacagcttttacactgaaaatcagcagagtggaggctgaggatgttggggtttattactgcatgcaagctctacaaactcctaagacttttggccaggggaccaagctggagatcaa

SEQ ID NO: 4935 - DNA, 335 bp, Artificial Sequence; identical to SEQ ID NO: 848
  Description of Artificial Sequence: Synthetic polynucleotide
  modified_base (40)..(40): a, c, t, g, unknown or other

SEQ ID NO: 4936 - protein, 9 aa, Artificial Sequence
  Description of Artificial Sequence: Synthetic peptide
MQALQTPKT

SEQ ID NO: 4937 - DNA, 352 bp, Artificial Sequence
  Description of Artificial Sequence: Synthetic polynucleotide
gtgcagctggtgcagtctggggctgaggtgaagaagcctgggtcctcggtgaaggtctcctgcaagtcttctggaggcatcttcagcaactttgctatcaattggatacgacaggcccctgggcaagggcttgtttggatgggagggatcatccctgccttccgaacagcaaactacgcacagagagtccagggcagagtcacgattaccgcggacgagtccacgagcacagtccacttggaagtgagcgccctgagacctgaggacaccgccatttattactgtgcgagagtgggaggtttggggagttatgactattggggccagggaacgctggtcaccgtctcctcag

SEQ ID NO: 4938 - DNA, 355 bp, Artificial Sequence; identical to SEQ ID NO: 125
  Description of Artificial Sequence: Synthetic polynucleotide

SEQ ID NO: 4939 - protein, 11 aa, Artificial Sequence
  Description of Artificial Sequence: Synthetic peptide
ARVGGLGSYDY

SEQ ID NO: 4940 - DNA, 308 bp, Artificial Sequence
  Description of Artificial Sequence: Synthetic polynucleotide
cctgtccgtcactcttggagagccggcctccatctcctgcaggtctagtcagagcctcctgcatagggatggaaacaactatttggattggtacctgcagaagccaggacggtctccacaactcctgatctatttgggttctagtcgggcctccggggtccctgaccggttcagtggcagtggatcaggcacagattttacactgaaaatcagcagagtggaggctgaggatattggggtttattactgcatgcaagctctccaaactccccacacttttggccaggggaccaaactggagatcaaac

SEQ ID NO: 4941 - DNA, 337 bp, Artificial Sequence; identical to SEQ ID NO: 1544
  Description of Artificial Sequence: Synthetic polynucleotide

SEQ ID NO: 4942 - protein, 9 aa, Artificial Sequence
  Description of Artificial Sequence: Synthetic peptide
MQALQTPHT

SEQ ID NO: 4943 - DNA, 349 bp, Artificial Sequence
  Description of Artificial Sequence: Synthetic polynucleotide
gtgcagctggtgcagtctggggctgaggtgaagaagcctgggtcctccgtgaaggtctcctgcaagacttctggaggcaccttcagcaactatgctatcagctgggtgcgacaggcccctggacaagggcttgagtggatgggagggatcatccctatctttggtacagcaaactacgcacagaagttccagggcagagtcaccattaccgcggacgaatccacgagcacagcctacatggagctgaacaacctgagatctgaggacacggccgtgtattactgtgcgcaagattcgtttgagcaactcgccaggtggggccagggaaccctggtcatcgtctcttcag

SEQ ID NO: 4944 - DNA, 352 bp, Artificial Sequence; identical to SEQ ID NO: 1577
  Description of Artificial Sequence: Synthetic polynucleotide

SEQ ID NO: 4945 - protein, 10 aa, Artificial Sequence
  Description of Artificial Sequence: Synthetic peptide
AQDSFEQLAR

SEQ ID NO: 4946 - DNA, 308 bp, Artificial Sequence
  Description of Artificial Sequence: Synthetic polynucleotide
cctgcccgtcacccctggagagccggcctccatctcctgcaggtctagtcagagcctcctgcataggagtggagacaactatatgcattggtacttgcagaagccagggcagtctccacagctcctcatctatttgagttctaatcgggcctccggggtccctgacaggttcagtggcagtggatcaggcacagattttacactgaaaatcagcagagtggaggctgaggatgttggggtttattactgcatgcaaggtctacaaactccgtacacttttggccaggggaccaggctggagatcaaac

SEQ ID NO: 4947 - DNA, 337 bp, Artificial Sequence; identical to SEQ ID NO: 1580
  Description of Artificial Sequence: Synthetic polynucleotide

SEQ ID NO: 4948 - protein, 9 aa, Artificial Sequence
  Description of Artificial Sequence: Synthetic peptide
MQGLQTPYT

SEQ ID NO: 4949 - DNA, 352 bp, Artificial Sequence
  Description of Artificial Sequence: Synthetic polynucleotide
gtgcagctggtgcagtctggggctgaggtgaagaagcctgggtcctcggtgaaggtctcctgcaaggcttctggaggcaccttcagcaactttgcaatcaactgggtgcgacaggcccctggacaagggcttgagtggatgggagggatcatccctgtctttggcacagcaaactacgcacagaagtttcagggcagagtcacgattaccgcggacgagtccacgagaacagcctacatggagataagtagactgagatctgaggacacggccgtgttttactgtgcgagagtgggaggttcggggagtcttgacgactggggccaggggaccctggtcaccgtctcctcag

SEQ ID NO: 4950 - DNA, 355 bp, Artificial Sequence; identical to SEQ ID NO: 1247
  Description of Artificial Sequence: Synthetic polynucleotide

SEQ ID NO: 4951 - protein, 11 aa, Artificial Sequence
  Description of Artificial Sequence: Synthetic peptide
ARVGGSGSLDD

SEQ ID NO: 4952 - DNA, 309 bp, Artificial Sequence
  Description of Artificial Sequence: Synthetic polynucleotide
ccctgcccgtcacccctggagagccggcctccatctcctgcaggtctagtcagagcctcctgcatagggatggatacaactatttggattggtacctgcagaagccagggcagtctccacaactcctgatctatatgggttttaatcgggcctccggggtccctgacaggttcagtggcagtggatcaggcacagattttacactgaaaatcagcagagtggaggctgaggatgttggggtttattactgcatgcaagctctacaaactcctaatacttttggccaggggaccaagctggaaatcaaac

SEQ ID NO: 4953 - DNA, 337 bp, Artificial Sequence; identical to SEQ ID NO: 1250
  Description of Artificial Sequence: Synthetic polynucleotide

SEQ ID NO: 4954 - protein, 9 aa, Artificial Sequence
  Description of Artificial Sequence: Synthetic peptide
MQALQTPNT

SEQ ID NO: 4955 - DNA, 349 bp, Artificial Sequence
  Description of Artificial Sequence: Synthetic polynucleotide
cagctggtgcagtctggggctgaggtgaagaagcctgggtcctcggtgaaggtctcctgcaagtcctctggaggcaccttcagtaattttgatatcagctgggtgcgacaggcccctggacaagggctggagtggatgggagggatcatccccgtctttggaacagcaacgtacgcaccgaagttccacggcagagtcacgattacggcggactcatccacgagcacagtgtacatggaagtgcccagcctgagatctgaggacacggccgtctattattgtgcgagatttggtggatatagtggctatgaggaatggggccagggaaccctggtcgccgtctcctcag

SEQ ID NO: 4956 - DNA, 355 bp, Artificial Sequence; identical to SEQ ID NO: 2105
  Description of Artificial Sequence: Synthetic polynucleotide

SEQ ID NO: 4957 - protein, 11 aa, Artificial Sequence
  Description of Artificial Sequence: Synthetic peptide
ARFGGYSGYEE

SEQ ID NO: 4958 - DNA, 304 bp, Artificial Sequence
  Description of Artificial Sequence: Synthetic polynucleotide
  modified_base (123)..(123): a, c, t, g, unknown or other
tggccgtcacccccggagagccggcctccatctcctgcaggtctagtcagagcctcctgcatagaaatggatacaactatttcgattggtacctgcagaggccagggcagtctccacagctcntgatctatttgggttctaatcgggcctccggggtccctgacaggttcagtggcagtggatcaggcacagattttacactgaaaatcagcagagtggaggctgaggatgttggggtttactactgcatgcaaggtctacaaactcctcggacttttggccaggggaccaagctggagatcaa

SEQ ID NO: 4959 - DNA, 335 bp, Artificial Sequence; identical to SEQ ID NO: 2108
  Description of Artificial Sequence: Synthetic polynucleotide
  modified_base (154)..(154): a, c, t, g, unknown or other

SEQ ID NO: 4960 - protein, 9 aa, Artificial Sequence
  Description of Artificial Sequence: Synthetic peptide
MQGLQTPRT

SEQ ID NO: 4961 - DNA, 349 bp, Artificial Sequence
  Description of Artificial Sequence: Synthetic polynucleotide
gtgcagctggtgcagtctggggctgaggtgaagaagcctgggtcctcggtaaaggtctcctgcaagacttctggaggcaccttcagcaactatgaaatcacttgggtgcgacaggcccctggacaagggcttgaatggatgggaggggtgatccctatttttggaacaccaaactacgcacagaagttccagggcagagtcacgattagcgcggacgaatccacgagtacagcctacatggagctgagcagcctgcgatccgaggacacggccatgtattattgtgcgaagagcagtggctggtcttttgactattggggccagggaacccaggtcaccgtctcctcag

SEQ ID NO: 4962 - DNA, 352 bp, Artificial Sequence; identical to SEQ ID NO: 2171
  Description of Artificial Sequence: Synthetic polynucleotide

SEQ ID NO: 4963 - protein, 10 aa, Artificial Sequence
  Description of Artificial Sequence: Synthetic peptide
AKSSGWSFDY

SEQ ID NO: 4964 - DNA, 308 bp, Artificial Sequence
  Description of Artificial Sequence: Synthetic polynucleotide
cctgcccgtcacccctggagagccggcctccatctcctgcaggtctagtcagagcctcctgaatagtgatggatacaactatttggattggtacctgcagaagccagggcagtctccacagctcctgatctatttgggttctaatcgggcctccggggtccctgacaggttcagtggcagtggatcaggcacagattttacactgaaaatcagcagagtggaggctgaggatgttggggtttattactgcatgcaatggatacaaaaatcgtacacttttggccaggggaccaagctggagatcaaac

SEQ ID NO: 4965 - DNA, 337 bp, Artificial Sequence; identical to SEQ ID NO: 2174
  Description of Artificial Sequence: Synthetic polynucleotide

SEQ ID NO: 4966 - protein, 9 aa, Artificial Sequence
  Description of Artificial Sequence: Synthetic peptide
MQWIQKSYT

SEQ ID NO: 4967 - DNA, 348 bp, Artificial Sequence
  Description of Artificial Sequence: Synthetic polynucleotide
tggtgcagtctggggctgtactgaagaagcctgggtcctcggtgaaggtctcctgcaaggcttctggaggcaccttcagtaactatgctatccactgggtgcgacaggcccctggacaagggcttgagtggatgggagggatcatccctctctttggtacagcaaactacgcacagaagttccggggcagagtcacgattaccgcggacggctccacgagcacagcctacatggacctgagcagcctcagatcgggggacacggccgtatattactgtgcgcgagagggcggggcaggagcctcccttgactactggggccagggaaccctggtcaccgtctcctcag

SEQ ID NO: 4968 - DNA, 358 bp, Artificial Sequence; identical to SEQ ID NO: 1877
  Description of Artificial Sequence: Synthetic polynucleotide

SEQ ID NO: 4969 - protein, 12 aa, Artificial Sequence
  Description of Artificial Sequence: Synthetic peptide
AREGGAGASLDY

SEQ ID NO: 4970 - DNA, 307 bp, Artificial Sequence
  Description of Artificial Sequence: Synthetic polynucleotide
tgccccgtcacccctggagagccggcctccatctcctgcaggtcgagtcagagcctcctgcatagagatggatacaactatttggattggtacctgcagaagccagggcagtctccacagctcctgatctatttgggttctactcgggcctccggagtccctgacaggttcagtggcagtggatcaggcacagattttacactgaaaatcagcagagtggaggctggggatgttggggtttattactgcatgcaagctctacaaactttcaggacttttggccaggggaccacgctggagatcaaac

SEQ ID NO: 4971 - DNA, 337 bp, Artificial Sequence; identical to SEQ ID NO: 1880
  Description of Artificial Sequence: Synthetic polynucleotide

SEQ ID NO: 4972 - protein, 9 aa, Artificial Sequence
  Description of Artificial Sequence: Synthetic peptide
MQALQTFRT

SEQ ID NO: 4973 - DNA, 352 bp, Artificial Sequence
  Description of Artificial Sequence: Synthetic polynucleotide
gtgcagctggtgcagtctggggctgaggtgaagaagcctgggtcctcggtgagggtctcctgcaaggtttctggaggcaccttcagcacctatgctatcaactgggtgcgacaggcccctggacaaggtcttgagtggatgggagggatcatccctgtctttggtacacccaattacgcacagaaattccagggcagagtcacaattaccgcggatgaatctgcgaggacagcctacatggagctgagcagcctgagatctgaggacacggccgtcttttattgtgcgagagatgggggtgcaaatccccttgactactggggccagggaaccctggtcaccgtctcttcag

SEQ ID NO: 4974 - DNA, 355 bp, Artificial Sequence; identical to SEQ ID NO: 2729
  Description of Artificial Sequence: Synthetic polynucleotide

SEQ ID NO: 4975 - protein, 11 aa, Artificial Sequence
  Description of Artificial Sequence: Synthetic peptide
ARDGGANPLDY

SEQ ID NO: 4976 - DNA, 307 bp, Artificial Sequence
  Description of Artificial Sequence: Synthetic polynucleotide
ctgcccgtcacccctggagagccggcctccatctcctgcaggtctagtcagagcctcctccatagtaatggatacaactatttgaattggtacctgcagaaaccagggcagtctccacagctcctgctctatttgggttctgatcgggcctccggggtccctgacaggttcagtggcagtggatcaggcacagattttacactgaaaatcagcagagtggaggctgaggatgttggggtttattactgcatgcaagctctacgggctccgtacgcttttggccaggggaccaagctggagatcaaac

SEQ ID NO: 4977 - DNA, 337 bp, Artificial Sequence; identical to SEQ ID NO: 2732
  Description of Artificial Sequence: Synthetic polynucleotide

SEQ ID NO: 4978 - protein, 9 aa, Artificial Sequence
  Description of Artificial Sequence: Synthetic peptide
MQALRAPYA

SEQ ID NO: 4979 - DNA, 352 bp, Artificial Sequence
  Description of Artificial Sequence: Synthetic polynucleotide
gtgcagctggtgcagtctggggctgaggtgaagaagcctgggtcctcggtgaaggtctcctgcaaggcttctggaggcactttcagcaattttgctatcagttgggtgcgacaggcccctggacaaggccttgagtggatgggggggatcattccagtctttggtacagcaaactacgcacagaagttccagggcagagtcacgattaccgcggacgagtccacgaacacagcctacatggagttgagcagcctgagatctgaagacacggccgtattttactgtgcgagagatgggggtgttaacccgctcgagtattggggccagggaagccaggtcaccgtctcctcag

SEQ ID NO: 4980 - DNA, 355 bp, Artificial Sequence; identical to SEQ ID NO: 2831
  Description of Artificial Sequence: Synthetic polynucleotide

SEQ ID NO: 4981 - protein, 11 aa, Artificial Sequence
  Description of Artificial Sequence: Synthetic peptide
ARDGGVNPLEY

SEQ ID NO: 4982 - DNA, 326 bp, Artificial Sequence
  Description of Artificial Sequence: Synthetic polynucleotide
  modified_base (4)..(4): a, c, t, g, unknown or other
  modified_base (6)..(14): a, c, t, g, unknown or other
cccncnnnnnnnnntctccctgcccgtcacccctggagagccggcctccatctcctgcaggtctagtcagagcctcctgcatagtcatggatacaactatttgaattggtacctgcaaaagccagggcagtccccacaactcctgatctatttgggttctaatcgggcctccggggtccctgacaggttcagtggcagtggatcaggcagagattttacactgaaaatcagtagagtggaggctgaggatgttggagtttattactgcatgcaagctctacaaactccgcacacttttggccaggggaccaagctggagatcaaac

SEQ ID NO: 4983 - DNA, 337 bp, Artificial Sequence; identical to SEQ ID NO: 2834
  Description of Artificial Sequence: Synthetic polynucleotide

SEQ ID NO: 4984 - protein, 9 aa, Artificial Sequence
  Description of Artificial Sequence: Synthetic peptide
MQALQTPHT

SEQ ID NO: 4985 - DNA, 352 bp, Artificial Sequence
  Description of Artificial Sequence: Synthetic polynucleotide
gtgcagctggtgcagtctggggcggaggtgaagaagcctgggtcctcggtgaaggtctcctgcaaggtttccggaggcactttcaacacctttgctatcaactgggtgcgccaggcccctggacaagggcttgagtggatgggacagatcatccctgtctttggtaccgcaaactacgcacagaaattccaggtcagagtcaaaattaccgcggacgaatcttcgagcacggcctacatggagctgaacagcctgagatctgaagacacggccgtgttttactgtgcgaggtcgggtggttcagggagttttgactactggggccagggaaccctggtcaccgtctcctcag

SEQ ID NO: 4986 - DNA, 355 bp, Artificial Sequence; identical to SEQ ID NO: 2855
  Description of Artificial Sequence: Synthetic polynucleotide

SEQ ID NO: 4987 - protein, 11 aa, Artificial Sequence
  Description of Artificial Sequence: Synthetic peptide
ARSGGSGSFDY

SEQ ID NO: 4988 - DNA, 309 bp, Artificial Sequence
  Description of Artificial Sequence: Synthetic polynucleotide
cctgccccgtcacccctggagagccggcctccatctcctgcaggtctagtcagagtctcctgcatcgtgatgggaacaactatttggattggtacctgcagaagccagggcagtctccacagctcctgctctatttggcttctaatcgggcctccggggtccctgacaggttcagcggcagtggatcaggcacatcttttacactgaaaatcagcagagtggaggctgaggatgttggggtttattactgcatggaaactctacgaactccgcacacttttggccaggggaccaagctggagatcaaac

SEQ ID NO: 4989 - DNA, 337 bp, Artificial Sequence; identical to SEQ ID NO: 2858
  Description of Artificial Sequence: Synthetic polynucleotide

SEQ ID NO: 4990 - protein, 9 aa, Artificial Sequence
  Description of Artificial Sequence: Synthetic peptide
METLRTPHT

SEQ ID NO: 4991 - DNA, 351 bp, Artificial Sequence
  Description of Artificial Sequence: Synthetic polynucleotide
tgcagctggtgcagtctggggctgaggtgaagaagcctgggtcgtcggtgaaggtctcctgtaaggcttctggaggcaccttcagcaactatgctatcaattgggtgcgaaaagtccctggacaagggcttgagtggatgggagggatcatccctttctttggtacaccaaactacgcacagaagttccaggacagagtcacgataaccgcagacgactccacgagcacagcctacatggaggtgcgcagcctgagatctgacgacacggccgtctattattgtgcgagagatgggggtgttaatccactggaatactggggccagggaaccctggtctccgtctcctcag

SEQ ID NO: 4992 - DNA, 355 bp, Artificial Sequence; identical to SEQ ID NO: 2861
  Description of Artificial Sequence: Synthetic polynucleotide

SEQ ID NO: 4993 - protein, 11 aa, Artificial Sequence
  Description of Artificial Sequence: Synthetic peptide
ARDGGVNPLEY

SEQ ID NO: 4994 - DNA, 329 bp, Artificial Sequence
  Description of Artificial Sequence: Synthetic polynucleotide
  modified_base (17)..(17): a, c, t, g, unknown or other
gatgactcagtctccantctccctgcccgtcacccctggagagtcggcctccatttcctgcaggtctagtcagagtctcctgcatagtaatggatacaactatttgaattggtacctgcagaaggcagggcagtctccacagctcctgatctatttgggttctaatcgggcctccggggtccctgacaggttcagcggcagtggatcaggcacagattttacactgaaaatcagcggagtggaggctgaggatgttggggtttattactgcatgcaagctctacaaactccgcacacttttggccaggggaccaagctggagatcaaac

SEQ ID NO: 4995 - DNA, 337 bp, Artificial Sequence; identical to SEQ ID NO: 2864
  Description of Artificial Sequence: Synthetic polynucleotide
  modified_base (25)..(25): a, c, t, g, unknown or other

SEQ ID NO: 4996 - protein, 9 aa, Artificial Sequence
  Description of Artificial Sequence: Synthetic peptide
MQALQTPHT

SEQ ID NO: 4997 - DNA, 352 bp, Artificial Sequence
  Description of Artificial Sequence: Synthetic polynucleotide
gtgcagctggtgcagtctggggctgaggtgaagaagcctgggtcctcggtgagggtctcctgcaaaatttctggaggcaacttcaacaagtatgctatcagctgggtgcgacaggcccctggacaagggcttgagtggatgggagggatcatccctatctttggtacaccaaactacgcacagaggtttcagggcagagtcaccattaccgcggacgaatccacgagcacagcctatatggagctgagtagcctgagatctgaggacacggccgtgtattattgtgcgagagatgggggggtgaccccaattgactactggggccagggaaccctggtcaccgtctcctcag

SEQ ID NO: 4998 - DNA, 355 bp, Artificial Sequence; identical to SEQ ID NO: 2357
  Description of Artificial Sequence: Synthetic polynucleotide

SEQ ID NO: 4999 - protein, 11 aa, Artificial Sequence
  Description of Artificial Sequence: Synthetic peptide
ARDGGVTPIDY

SEQ ID NO: 5000 - DNA, 308 bp, Artificial Sequence
  Description of Artificial Sequence: Synthetic polynucleotide
cctgcccgtcacccctggagagccggcctccatctcctgcaggtctagtcagagcctcctgcatcgtagtggatacaactatatggattggtacctgcagaagccagggcagtctccacagctcctgatctatttgggttctaatcgggcctccggggtccctgacaggttcagtggcagtggatcaggcacagattttacactgaaaatcagcagagtggaggctgaggatgttggggtttattactgcatgcaagctctacaaactccgtacacttttggccaggggaccaagctggagatcaaac

SEQ ID NO: 5001 - DNA, 337 bp, Artificial Sequence; identical to SEQ ID NO: 2360
  Description of Artificial Sequence: Synthetic polynucleotide

SEQ ID NO: 5002 - protein, 9 aa, Artificial Sequence
  Description of Artificial Sequence: Synthetic peptide
MQALQTPYT

SEQ ID NO: 5003 - DNA, 358 bp, Artificial Sequence
  Description of Artificial Sequence: Synthetic polynucleotide
gtgcagctggtgcagtctggggctgaggtgaagaagcctgggtcctcggtgaaggtctcctgcaaggcttctggaggcgccttcagcaactttggtttcagctgggtgcgacaggcccctggacaagggcttgagtggttggggatgatcatccctgcctttggttcaccaatctacgcacagaagttccggggcagagtcaccattagtgcggacgaatccatcagtacagcctacatggaactgagaaacctgaagtctgaggacacgggcgtctatttctgtgcgagagagggtgggggaatagggcccagcttggactactggggccagggaaccctggtcgccgtctcctcag

SEQ ID NO: 5004 - DNA, 361 bp, Artificial Sequence; identical to SEQ ID NO: 2441
  Description of Artificial Sequence: Synthetic polynucleotide

SEQ ID NO: 5005 - protein, 13 aa, Artificial Sequence
  Description of Artificial Sequence: Synthetic peptide
AREGGGIGPSLDY

SEQ ID NO: 5006 - DNA, 308 bp, Artificial Sequence
  Description of Artificial Sequence: Synthetic polynucleotide
cctgcccgtcacccctggagagccggcctccatctcctgcaggtctagtcagagcctcctgcatagttctggcgacaactatctggattggtacctgcagaagccagggcagtctccacaattgctgatctatttgggctctaatcgggcccccggggtccctgaccggttcagtggcagtggatcaggcacagattttacactgaaaatcagtagagttgaggctgaggatgttggggtttattactgcatgcaagctctacaaactcctcggacttttggccaggggaccaaactggagatcaaac

SEQ ID NO: 5007 - DNA, 337 bp, Artificial Sequence; identical to SEQ ID NO: 2444
  Description of Artificial Sequence: Synthetic polynucleotide

SEQ ID NO: 5008 - protein, 9 aa, Artificial Sequence
  Description of Artificial Sequence: Synthetic peptide
MQALQTPRT

SEQ ID NO: 5009 - DNA, 340 bp, Artificial Sequence
  Description of Artificial Sequence: Synthetic polynucleotide
cagtctggggctgaggtgaagaagcctgggtcctcggtgaaggtctcctgcaaggcttctggaggcaccttcagcaactatgctatcacctgggtgcgacaggcccctggacaaggccttgagtggatgggagggatcatccctctctttggtacaccaaactacgcacagaagttccagggcagagtcacgattaccgcggacgaatctacgagcacagcctacatggagctgagcagcctgagatctgaggacacggccgtgttttactgtgcgagagatgacggggtgacacctatgagttactggggccagggaaccctggtcaccgtctcctcag

SEQ ID NO: 5010 - DNA, 355 bp, Artificial Sequence; identical to SEQ ID NO: 3173
  Description of Artificial Sequence: Synthetic polynucleotide

SEQ ID NO: 5011 - protein, 11 aa, Artificial Sequence
  Description of Artificial Sequence: Synthetic peptide
ARDDGVTPMSY

SEQ ID NO: 5012 - DNA, 308 bp, Artificial Sequence
  Description of Artificial Sequence: Synthetic polynucleotide
cctgcccgtcacccctggagagccggcctccatctcctgcaggtctagtcagagcctcctgcatagtattggatacaactatttaaattggtacctgcagaagccagggcagtctccacagctcctgatctatttgggttctaatcgggcctccggggtccctgacaggttcagtggcagtggatcaggcacagattttacactgaaaatcagcagagtggaggctgaggatgttggggtttattactgcgcgcaagttctacaaactcctcacacttttggccaggggaccaagctggagatcaaac

SEQ ID NO: 5013 - DNA, 337 bp, Artificial Sequence; identical to SEQ ID NO: 3176
  Description of Artificial Sequence: Synthetic polynucleotide

SEQ ID NO: 5014 - protein, 9 aa, Artificial Sequence
  Description of Artificial Sequence: Synthetic peptide
AQVLQTPHT

SEQ ID NO: 5015 - DNA, 343 bp, Artificial Sequence
  Description of Artificial Sequence: Synthetic polynucleotide
cagtctggggctgaggtgaagaagcctgggtcctcggtgagggtctcctgcaaggcttctggaggcaccttcagtaactttgctatcagctgggtgcgacaggcccctggacaagggcttgagtggatgggaggggtcatccctctctttggtacaccaaactacgcacagaagttccagggcagagtcaccattaccgcggacgaatccacgagcacagcccacatggagctgagcagcctgagaagtgaggacacggccgtgtattactgtgcgagagaggggggagcagcagccgaatttgactactggggccagggaaccctggtcaccgtctcctcag

SEQ ID NO: 5016 - DNA, 358 bp, Artificial Sequence; identical to SEQ ID NO: 3215
  Description of Artificial Sequence: Synthetic polynucleotide

SEQ ID NO: 5017 - protein, 12 aa, Artificial Sequence
  Description of Artificial Sequence: Synthetic peptide
AREGGAAAEFDY

SEQ ID NO: 5018 - DNA, 308 bp, Artificial Sequence
  Description of Artificial Sequence: Synthetic polynucleotide
cctgcccgtcacccctggagagccggcctccatctcctgcaggtctagtcagagcctcctgcatagaactggatacaactatttggattggtacctgcagaagccagggcagtctccacagctcctgatctatttgggttctaatcgggcctccggggtccctgacaggttcagtggcagtggatcaggcacagattttacactgaaaatcagcagagtggaggctgaggatgttgggttttattactgcatgcaaagtctacaaactcctcgaacttttggccaggggaccaagctggagatcaaac

SEQ ID NO: 5019 - DNA, 337 bp, Artificial Sequence; identical to SEQ ID NO: 3218
  Description of Artificial Sequence: Synthetic polynucleotide

SEQ ID NO: 5020 - protein, 9 aa, Artificial Sequence
  Description of Artificial Sequence: Synthetic peptide
MQSLQTPRT

SEQ ID NO: 5021 - DNA, 352 bp, Artificial Sequence
  Description of Artificial Sequence: Synthetic polynucleotide
gtgcagctggtgcagtctggggctgaggtgaagaagcctgggtcctcggtgaaggtctcctgcacggcttctggaggcaccttcagcaattttgctatccactgggtgcgacaggcccctggacaaggacttgagtggatggggcggatcatccctgtcttcggtacaccaaattacgcacagatgttccagggcagagtcacgattaccgcggacgaatccaggaacacagcctatttggttctgagcagcctgaggtccgaggacacggccatttattactgtgcgcgagacggggggcagggctccttggactactggggccagggaaccctggtcaccgtctcctcag

SEQ ID NO: 5022 - DNA, 355 bp, Artificial Sequence; identical to SEQ ID NO: 3257
  Description of Artificial Sequence: Synthetic polynucleotide

SEQ ID NO: 5023 - protein, 11 aa, Artificial Sequence
  Description of Artificial Sequence: Synthetic peptide
ARDGGQGSLDY

SEQ ID NO: 5024 - DNA, 308 bp, Artificial Sequence
  Description of Artificial Sequence: Synthetic polynucleotide
cctgcccgtcacccctggagagccggcctccatctcctgcaggtctagtcagagcctcctgcatagaactggatacaactatttggattggtacctgcagaagccagggcagtctccgcagctcctgatctatttgggttctaatcgggcctccggggtccctgacaggttcagtggcagtggatcaggcacagattttacactgaaaatcagcagagtggaggctgaggatgttggggtttattactgcatgcaacctctacaaactcctcacacttttggccaggggaccaagctggagatcaaac

SEQ ID NO: 5025 - DNA, 337 bp, Artificial Sequence; identical to SEQ ID NO: 3260
  Description of Artificial Sequence: Synthetic polynucleotide

SEQ ID NO: 5026 - protein, 9 aa, Artificial Sequence
  Description of Artificial Sequence: Synthetic peptide
MQPLQTPHT

SEQ ID NO: 5027 - DNA, 358 bp, Artificial Sequence
  Description of Artificial Sequence: Synthetic polynucleotide
gtgcagctggtgcagtctggggctgaggtgaagaagcctgggtcctcggtgaaggtctcctgcaaggcttctgggggcgccttcagcaactatgctgtcaactgggtgcgacaggcccctggacaagggcttgagtggatgggtgggatcatccctgtctttaatacaccgaactacgcacagagattccggggcagagtcaccattaccgcggacgagtccacgagcacagcctacatggagctgagcagcctgagatctgaggacacggccatgtattactgtgcgagaggaggggatagtagtaattccttgggggactactggggccagggaaccctggtcaccgtctcctcag

SEQ ID NO: 5028 - DNA, 361 bp, Artificial Sequence; identical to SEQ ID NO: 3329
  Description of Artificial Sequence: Synthetic polynucleotide

SEQ ID NO: 5029 - protein, 13 aa, Artificial Sequence
  Description of Artificial Sequence: Synthetic peptide
ARGGDSSNSLGDY

SEQ ID NO: 5030 - DNA, 303 bp, Artificial Sequence
  Description of Artificial Sequence: Synthetic polynucleotide
tgcccgtcacccctggagagccggcctccatctcctgcaggtctagtcagagcctcctacatagaactggatacacctatttggattggtatatgcagaagccagggcagtctccacacctcctgatctatttgggttctactcgggcctccggggtccctgacaggttcagtggcagtggatcaggcacagattttacactgaaaatcagcagagtggaggctgaggatgttggggtttattactgcatgcaagctctacaaactccgtacacttttggccaagggaccaagctggagatca

SEQ ID NO: 5031 - DNA, 334 bp, Artificial Sequence; identical to SEQ ID NO: 3332
  Description of Artificial Sequence: Synthetic polynucleotide

SEQ ID NO: 5032 - protein, 9 aa, Artificial Sequence
  Description of Artificial Sequence: Synthetic peptide
MQALQTPYT

SEQ ID NO: 5033 - DNA, 352 bp, Artificial Sequence
  Description of Artificial Sequence: Synthetic polynucleotide
gtgcagctggtgcagtctggggctgaggtgaagaagcctgggtcctcggtgaaggtctcctgcaaggcttctggaggcaccttcagcaattttgctattagttgggtgcgacaggccccccgacaagggcttgagtggatgggatccatcatccctgcctttggtacaccaaactacgcacagaagtttcagggcagagtcacgataaccgcggacggatccacgagcacagcctacattgaactaagcagcctgagatctggggacacggccgtgtattattgtgcaagagaagacggaagtgggagctacgacgactggggccagggaaccctggtcaccgtctcctcag

SEQ ID NO: 5034 - DNA, 355 bp, Artificial Sequence; identical to SEQ ID NO: 3473
  Description of Artificial Sequence: Synthetic polynucleotide

SEQ ID NO: 5035 - protein, 11 aa, Artificial Sequence
  Description of Artificial Sequence: Synthetic peptide
AREDGSGSYDD

SEQ ID NO: 5036 - DNA, 308 bp, Artificial Sequence
  Description of Artificial Sequence: Synthetic polynucleotide
cctgcccgtcacccctggagagccggcctccatctcctgcaggtctagtcagagcctcctgcatcgggatggatacaactatttggattggtacctgcagaagccagggcagtctccacagctcctgatctatttgggttctaatcgggcctccggggtccctgacaggttcagtggcagtggatcaggcacagatttttcactgaaaatcagcagagtggaggctgaggatgttggggtttattactgcatgcaagctctacaaattcctcggacttttggccaggggaccaagctggagatcaaac

SEQ ID NO: 5037 - DNA, 337 bp, Artificial Sequence; identical to SEQ ID NO: 3476
  Description of Artificial Sequence: Synthetic polynucleotide

SEQ ID NO: 5038 - protein, 9 aa, Artificial Sequence
  Description of Artificial Sequence: Synthetic peptide
MQALQIPRT

SEQ ID NO: 5039 - DNA, 352 bp, Artificial Sequence
  Description of Artificial Sequence: Synthetic polynucleotide
gtgcagctggtgcagtctggggctgacgtgaagaagcctgggtcctcggttaaggtctcctgcaggacttctggaggcaccttcaacaactatgctatcaactgggtgcgacaggcccctggacaagggcttgagtggatgggagggatcatccctgtctttgggacagcaaaatacgcaaagaagttccagggcagagtcacggttactgcggacgaatccacgagcacagcctacttggaactgaacagcctgacacctgaggacacggccttttattactgcgcgagagatgggggagggggctcctttgactactggggccagggaaccctggtcaccgtctcctcag

SEQ ID NO: 5040 - DNA, 355 bp, Artificial Sequence; identical to SEQ ID NO: 3497
  Description of Artificial Sequence: Synthetic polynucleotide

SEQ ID NO: 5041 - protein, 11 aa, Artificial Sequence
  Description of Artificial Sequence: Synthetic peptide
ARDGGGGSFDY

SEQ ID NO: 5042 - DNA, 310 bp, Artificial Sequence
  Description of Artificial Sequence: Synthetic polynucleotide
tgccccgtcacccctggagagccggcctccatctcctgcaaatctagtcagagcctcctacatcgtactggatacaactatttggattggtacctgcagaagccagggcagcctccacagctcctgatctatttgggttctcatcgggcctccggggtccctgacaggttcagtggcagtggatcaggcacagattttacactgaaaatcagcagagtggaggctgaggatgttggggtttattactgcatgccaactctacaaactctcatgtacacttttggccaggggaccaagctggagatcaaac

SEQ ID NO: 5043 - DNA, 340 bp, Artificial Sequence; identical to SEQ ID NO: 3500
  Description of Artificial Sequence: Synthetic polynucleotide

SEQ ID NO: 5044 - protein, 10 aa, Artificial Sequence
  Description of Artificial Sequence: Synthetic peptide
MPTLQTLMYT

SEQ ID NO: 5045 - DNA, 355 bp, Artificial Sequence
  Description of Artificial Sequence: Synthetic polynucleotide
gtgcagctggtgcagtctggggcagagatgaagaagcctgggtcctcggtgaaggtctcctgcaaggcttctggaggcaccttcagtaactatcctattagctgggtgcgacaggcccctggacaagggcttgagtggatgggatggatcatccctttttttggtacaccaaagtacgcacagaagttccagggtagagtcaccatcaccgcggacgaatccacgagtacagggtttatggaactgaggagcctgacagctgaagacacggccgtctatttttgtgtaagaggggcgggagccaccggggattttgactactggggccagggaaccctggtcaccgtctcctcag

SEQ ID NO: 5046 - DNA, 358 bp, Artificial Sequence; identical to SEQ ID NO: 2993
  Description of Artificial Sequence: Synthetic polynucleotide

SEQ ID NO: 5047 - protein, 12 aa, Artificial Sequence
  Description of Artificial Sequence: Synthetic peptide
VRGAGATGDFDY

SEQ ID NO: 5048 - DNA, 328 bp, Artificial Sequence
  Description of Artificial Sequence: Synthetic polynucleotide
  modified_base (16)..(16): a, c, t, g, unknown or other
atgactcagtctccantctccctgcccgtcacccctggagagccggcctccatctcctgcaggtctagtcagagcctcctgcaccgtgatggaaacaactatttgaattggttcctgcagaagccagggcagtctccacagctcctgatctatttgggttctaaccgggcctccggggtccctgccaggttcagtggcagtggttcaggcacagattttacactgaagatcagcagagtggaggctgaggatgttggggttttttactgcatgcaaggtcttcaagctccgtacacttttggccaggggaccaagctggagatcaaac

SEQ ID NO: 5049 - DNA, 337 bp, Artificial Sequence; identical to SEQ ID NO: 2996
  Description of Artificial Sequence: Synthetic polynucleotide
  modified_base (25)..(25): a, c, t, g, unknown or other

SEQ ID NO: 5050 - protein, 9 aa, Artificial Sequence
  Description of Artificial Sequence: Synthetic peptide
MQGLQAPYT

SEQ ID NO: 5051 - DNA, 397 bp, Artificial Sequence
  Description of Artificial Sequence: Synthetic polynucleotide
  modified_base (22)..(24): a, c, t, g, unknown or other
  modified_base (26)..(26): a, c, t, g, unknown or other
  modified_base (31)..(33): a, c, t, g, unknown or other
  modified_base (36)..(39): a, c, t, g, unknown or other
  modified_base (41)..(42): a, c, t, g, unknown or other
gagtctgttccgaggtgcagcnnntnatggnnngtnnnntnncaggtgcagctggtgcagtctggggctgaggtgaagaagcctgggtcttcggtgaaggtctcctgcaaggcttctggaggcaccttcagcaactacgatatcagctgggtgcgacaggtccctggacaagggcttgaatggatgggagggctcatacccttctttggcacaccaaagtacactcacaaattccagggcagagtcacgattaccgcggacgagtccacgaccacagcctacatggaactgaggaacctaaaagatgaagacaccggcgtctattactgtgcgagagacgatggaactgcaagctttggctactggggccagggaaccctggtcaccgtctcctcag

SEQ ID NO: 5052 - DNA, 355 bp, Artificial Sequence; identical to SEQ ID NO: 3005
  Description of Artificial Sequence: Synthetic polynucleotide

SEQ ID NO: 5053 - protein, 11 aa, Artificial Sequence
  Description of Artificial Sequence: Synthetic peptide
ARDDGTASFGY

SEQ ID NO: 5054 - DNA, 308 bp, Artificial Sequence
  Description of Artificial Sequence: Synthetic polynucleotide
cctgcccgtcacccctggagagtcggcctccatctcctgcagggctagtcagagcctcctgcataggagtggatacacctatttggattggtacctgcagaagccagggcagtctccacagctcctgatctatttgagttctaatcgggcctccggggtccctgacaggttcagtggcagtggatcaggcacagattttacactgagaatcagcagagtggaggctgaggatgttggggtttattactgcatgcaagctctacaaactcctcggacctttggccaggggaccaagctggagatcaaac

SEQ ID NO: 5055 - DNA, 337 bp, Artificial Sequence; identical to SEQ ID NO: 3008
  Description of Artificial Sequence: Synthetic polynucleotide

SEQ ID NO: 5056 - protein, 9 aa, Artificial Sequence
  Description of Artificial Sequence: Synthetic peptide
MQALQTPRT

SEQ ID NO: 5057 - DNA, 352 bp, Artificial Sequence
  Description of Artificial Sequence: Synthetic polynucleotide
gtgcagctggtgcagtctggggctgaggtgaagaagcctgggtcctcggtgaaggtctcctgcaaggcttctggaggcaccttcagcaactatgcaatcaactgggtgcgacaggcccctggacaagggcttgagtggatgggaggaatcatacctctgtttgctacaccaaagtacgcacagaagttccagggcagagtcacaattaccgcggacgaatccacgagcactgcctacatggagctgagcagtctaaaatctgaagacacggccatatattactgtacgagagatggaggtgtgtcacttcttgactactggggccagggaaccctggtcaccgtctcctcag

SEQ ID NO: 5058 - DNA, 355 bp, Artificial Sequence; identical to SEQ ID NO: 3647
  Description of Artificial Sequence: Synthetic polynucleotide

SEQ ID NO: 5059 - protein, 11 aa, Artificial Sequence
  Description of Artificial Sequence: Synthetic peptide
TRDGGVSLLDY

SEQ ID NO: 5060 - DNA, 308 bp, Artificial Sequence
  Description of Artificial Sequence: Synthetic polynucleotide
cctgcccgtcacccctggagagccggcctccatctcctgcaggtctagtcagagcctcctgcatagaactggatacacctatttgcaatggtacctgcagaagccagggcagtctccacagctcctgatctatttgggttctagtcgggcctccggggtccctgacaggttcagtggcagtggatcaggcacagattttacactgataatcagtagagtggaggctgaggatgttggggtttactactgcatgcaagctctacaaaccccgtacacttttggccaggggaccaagctggagatcaaac

SEQ ID NO: 5061 - DNA, 337 bp, Artificial Sequence; identical to SEQ ID NO: 3650
  Description of Artificial Sequence: Synthetic polynucleotide

SEQ ID NO: 5062 - protein, 9 aa, Artificial Sequence
  Description of Artificial Sequence: Synthetic peptide
MQALQTPYT

SEQ ID NO: 5063 - DNA, 355 bp, Artificial Sequence
  Description of Artificial Sequence: Synthetic polynucleotide
gtgcagctggtgcagtctggggctgaggtgaagagtcctgggtcctcggtgagggtctcctgcaaggcttctggaggcaccttcagcacctttgctaccagctgggtgcgacaggcccctggacaagggcttgagtggatgggagagatcatccctgtctttggaacaccaacctacgcacagaaattccagggcagagtcacaattaccgcggacgaatccacgagtacctcatacatggagctgagcagcctgacatcagacgacacggccgtgtattactgtgcgagagatgggggtggttcggcgagtttcgactactggggccagggaaccctggtcaccgtctcctcag

SEQ ID NO: 5064 - DNA, 358 bp, Artificial Sequence; identical to SEQ ID NO: 3749
  Description of Artificial Sequence: Synthetic polynucleotide

SEQ ID NO: 5065 - protein, 12 aa, Artificial Sequence
  Description of Artificial Sequence: Synthetic peptide
ARDGGGSASFDY

SEQ ID NO: 5066 - DNA, 308 bp, Artificial Sequence
  Description of Artificial Sequence: Synthetic polynucleotide
cctgcccgtcacccctggagagccggcctccatctcctgcaggtctagtcagagcctcctacatagtaatggatacaactatttggattggtacctgcagaagccagggcagtctccacaggtcctgatctttttgggttctaatcgggcctccggggtccctgacaggttcagtggcagtggatcaggcacacattttacactgaaaatcagcagagtggaggctgaggatgttggggtttattactgcatgcaaagtctacgaactcctcggacctttggccaggggaccaagctggagatcaaac

SEQ ID NO: 5067 - DNA, 337 bp, Artificial Sequence; identical to SEQ ID NO: 3752
  Description of Artificial Sequence: Synthetic polynucleotide

SEQ ID NO: 5068 - protein, 9 aa, Artificial Sequence
  Description of Artificial Sequence: Synthetic peptide
MQSLRTPRT

SEQ ID NO: 5069 - DNA, 349 bp, Artificial Sequence
  Description of Artificial Sequence: Synthetic polynucleotide
cagctggtgcagtctggggctgaggtgaagaagcctgggtcctcggtgaaggtctcctgcaaggtttctggaggcagcttcattcattatgaaatcagctgggtgcgacaggcccctggacatggacttgagtggatgggacggatcatccctggctttggtacagcaacctacgcacagaagttcgaggacagagtcacgattactccggacgaatcagcgagcacagcctatatggagctgaccactctgcgacctgaggacacggccctttacttctgtgcgcgagatgggggttcggggagttttgactactggggccagggaacgcaggtcaccgtctcctcag

SEQ ID NO: 5070 - DNA, 355 bp, Artificial Sequence; identical to SEQ ID NO: 4133
  Description of Artificial Sequence: Synthetic polynucleotide

SEQ ID NO: 5071 - protein, 11 aa, Artificial Sequence
  Description of Artificial Sequence: Synthetic peptide
ARDGGSGSFDY

SEQ ID NO: 5072 - DNA, 307 bp, Artificial Sequence
  Description of Artificial Sequence: Synthetic polynucleotide
tgccccgtcacccctggagagccggcctccatctcctgcaggtctagtcagagcctcctgcatagagatggatacaactacttggattggtacctgcagaagccagggcagtctccacaactcctgatctttttgggttctaatcgggcctccggggtccctgacaggttcagtggcagtggatcaggcacagattttacacttagaatcagcagagtggaggctgaggatattggggtttattactgcatgcaggctctacaaactcctcggacttttggccaggggacgaagctggagatcaaac

SEQ ID NO: 5073 - DNA, 337 bp, Artificial Sequence; identical to SEQ ID NO: 4136
  Description of Artificial Sequence: Synthetic polynucleotide

SEQ ID NO: 5074 - protein, 9 aa, Artificial Sequence
  Description of Artificial Sequence: Synthetic peptide
MQALQTPRT

SEQ ID NO: 5075 - DNA, 351 bp, Artificial Sequence
  Description of Artificial Sequence: Synthetic polynucleotide
tgcagctggtgcagtctggggctgaggtgaagaagcctgggtcctcggtgaaggtctcctgcaaggcttctggaggcaccttcagccactttgccatcagctgggtgcgacaggcccctggacaagggcttgagtgggtgggcgacatcatccctctctttgctacaccgaactacgcacagaagttccgggacagagtcacgatttccgcggacgaatccacggccacagcctacatggaggtgagcagcctgagatctgacgacacggccgtctatttctgtgcgcgagatgatggttcggcgagttacgcctactggggccagggaaccctggtcagcgtctcctcag

SEQ ID NO: 5076 - DNA, 355 bp, Artificial Sequence; identical to SEQ ID NO: 3629
  Description of Artificial Sequence: Synthetic polynucleotide

SEQ ID NO: 5077 - protein, 11 aa, Artificial Sequence
  Description of Artificial Sequence: Synthetic peptide
ARDDGSASYAY

SEQ ID NO: 5078 - DNA, 308 bp, Artificial Sequence
  Description of Artificial Sequence: Synthetic polynucleotide
cctgcccgtcacccctggagagccggcctccatctcctgcaggtctagtcagagcctcctgcataggagtggattcacctatttggattggtacctgcagaagccagggcagtctccacagctcctgatctatttgggttctaatcgggcctccggggtccctgacagattcagtggcagtggatcaggcacagattttacactgaaaatcagtagagtggaggctgaggatgttggggtttattactgcatgcaggctctgcaaactcctcgaacttttggccaggggaccaagctggagatcaaac

SEQ ID NO: 5079 - DNA, 337 bp, Artificial Sequence; identical to SEQ ID NO: 3632
  Description of Artificial Sequence: Synthetic polynucleotide

SEQ ID NO: 5080 - protein, 9 aa, Artificial Sequence
  Description of Artificial Sequence: Synthetic peptide
MQALQTPRT

SEQ ID NO: 5081 - DNA, 352 bp, Artificial Sequence
  Description of Artificial Sequence: Synthetic polynucleotide
gtgcagctggtgcagtctggggctgaggtgaagaagcctgggtcctcggtgaaggtctcctgcaaggcttctggaggaatcttcagtaactatgctatcaactgggtgcggcaggcccctggacaagggcctgagtggatgggacggatcatccctgtctttattacaccagactacgcacagaagttccagggcagagtcacgattactgcggacgaatccacgagcacagcctacatggagctgagcagcctgagatctgaggacacggccgtgtattactgtgcgagagacggtggaatggggagttacgactactggggccagggaaccttggtcaccgtctcctcag

SEQ ID NO: 5082 - DNA, 355 bp, Artificial Sequence; identical to SEQ ID NO: 3689
  Description of Artificial Sequence: Synthetic polynucleotide

SEQ ID NO: 5083 - protein, 11 aa, Artificial Sequence
  Description of Artificial Sequence: Synthetic peptide
ARDGGMGSYDY

SEQ ID NO: 5084 - DNA, 308 bp, Artificial Sequence
  Description of Artificial Sequence: Synthetic polynucleotide
cctgcccgtcacccctggagagccggcctccatctcctgcaggtctagtcagagcctccggcatagggatggaaacaactatttggattggtacctgcagaagccagggcagtctccacagctcctgatctatttgggttctaatcgggcctccggggtccctgacaggttcagtggcagtgggtcaggcacagattttacactgagaatcagcagagtggaggctgaggatgttgggatttattactgcatgcaacctctacaaactcctcacacttttggccaggggaccaagctggagatcaaac

SEQ ID NO: 5085 - DNA, 337 bp, Artificial Sequence; identical to SEQ ID NO: 3692
  Description of Artificial Sequence: Synthetic polynucleotide

SEQ ID NO: 5086 - protein, 9 aa, Artificial Sequence
  Description of Artificial Sequence: Synthetic peptide
MQPLQTPHT

SEQ ID NO: 5087 - DNA, 352 bp, Artificial Sequence
  Description of Artificial Sequence: Synthetic polynucleotide
gtgcagctggtgcagtctggggctgaggtgaagaagcctgggtcctcggtgaaggtctcctgcaaggtttctggaggcaacttcaacaattatgatattagttgggtgcgacaggcccctggacaagggcttgagtggatgggagggatcatccctatcttcggtacagcaaactacgcacagaagttccaggccagactcacgatctccgcggacgaatccacgagcacagcctacatggagctgagcagcctaaggtgtgaagacacggccgtgtattactgtgcgagagatgatggtttggggagtcatggttactggggccagggaaccctggtcaccgtctcctcag

SEQ ID NO: 5088 - DNA, 355 bp, Artificial Sequence; identical to SEQ ID NO: 3695
  Description of Artificial Sequence: Synthetic polynucleotide

SEQ ID NO: 5089 - protein, 11 aa, Artificial Sequence
  Description of Artificial Sequence: Synthetic peptide
ARDDGLGSHGY

SEQ ID NO: 5090 - DNA, 308 bp, Artificial Sequence
  Description of Artificial Sequence: Synthetic polynucleotide
cctgcccgtcacccctggagagccggcctccatctcctgcaggtctactcagagcctcctgcatagaactggattcaactatttggattggtacctgcagaagccagggcagtctccacaactcctgatctatttgggttctaatcgggcctccggggtccctgacaggttcagtggcagtggatcaggcacatattttacactgaaaatcagcagagtggaggctgaggatgttggggtttattactgcatgcaagctctacaaactcctcgaacttttggccaggggaccaagctggagatcaaac

SEQ ID NO: 5091 - DNA, 337 bp, Artificial Sequence; identical to SEQ ID NO: 3698
  Description of Artificial Sequence: Synthetic polynucleotide

SEQ ID NO: 5092 - protein, 9 aa, Artificial Sequence
  Description of Artificial Sequence: Synthetic peptide
MQALQTPRT

SEQ ID NO: 5093 - DNA, 349 bp, Artificial Sequence
  Description of Artificial Sequence: Synthetic polynucleotide
cagctggtgcagtctggggctgaggtgaagaagcctgggtcctcggtgagggtctcctgcaaggcttctggaggcaccttcagcaactatgctatcgactgggtgcgacaggcccctggacaagggcttgagtgggtgggagggatcatccctctctttgctacggcaaactacgcacagaagttccagggcagagtcacaattaccgcggacgcatccacgagcacagcctacatggagtttaagagcctgagatctgaggacacggccatgtattactgtgcgagagatgattccattacacccttagggtactggggcctgggaaccctggtcaccgtctcctcag

SEQ ID NO: 5094 - DNA, 355 bp, Artificial Sequence; identical to SEQ ID NO: 4457
  Description of Artificial Sequence: Synthetic polynucleotide

SEQ ID NO: 5095 - protein, 11 aa, Artificial Sequence
  Description of Artificial Sequence: Synthetic peptide
ARDDSITPLGY

SEQ ID NO: 5096 - DNA, 308 bp, Artificial Sequence
  Description of Artificial Sequence: Synthetic polynucleotide
cctgcccgtcacccctggagagccggcctccatctcctgcaggtctagtcagagcctcctgcatagtaatggatacaactatttggattggtacctgcagaagccagggcagtctccacagctcctgatctatttgggttctcatcgggcctccggggtccctgacaggttcagtggcagtggatcaggcacagattttacactgaaaatcagcagagtggaggctgaggatgttggggtttattactgcatgcaagctcgacaaagtccgtacacttttggccaggggaccaagctggagatcaaac

SEQ ID NO: 5097 - DNA, 337 bp, Artificial Sequence; identical to SEQ ID NO: 4460
  Description of Artificial Sequence: Synthetic polynucleotide

SEQ ID NO: 5098 - protein, 9 aa, Artificial Sequence
  Description of Artificial Sequence: Synthetic peptide
MQARQSPYT

SEQ ID NO: 5099 - DNA, 334 bp, Artificial Sequence
  Description of Artificial Sequence: Synthetic polynucleotide
ggggctgaggtgaagaagcctgggtcctcggtgaaggtctcctgcaaggcctctggaggcaccttcagccactatgctatctgctgggtgcgacaggcccctggacaaggccttgagtggatgggagcgatcatccctgcctttgggacagccacgtatgcacagaagttcaagggcagagtcaccattaccgcggacgaatccacgagcacagcctacatggaggtgaccagcctgagatttgacgacacggccgtctttttctgtgcgcgagaggacggggtcggatcctatgactcctggggccagggaaccctggtcaccgtctcctcag

SEQ ID NO: 5100 - DNA, 355 bp, Artificial Sequence; identical to SEQ ID NO: 4661
  Description of Artificial Sequence: Synthetic polynucleotide

SEQ ID NO: 5101 - protein, 11 aa, Artificial Sequence
  Description of Artificial Sequence: Synthetic peptide
AREDGVGSYDS

SEQ ID NO: 5102 - DNA, 309 bp, Artificial Sequence
  Description of Artificial Sequence: Synthetic polynucleotide
cctgccccgtcgcccctggagagccggcctccatctcctgcaggtctagtcagagcctcctgcatagagatggaaacaactatttggattggtacctgcagaagccagggcagtctccacaactcctgatctatttgggttctaatcgggcctccggggtccctgacaggttcagtggcagtggatcaggcacatattttacactgaaaatcagcagagtggaggctgaggatgttggggtttattactgcatgcaagctctacaaactccccgtgtttttggccaggggaccaggctggagatcaaac

SEQ ID NO: 5103 - DNA, 337 bp, Artificial Sequence; identical to SEQ ID NO: 4784
  Description of Artificial Sequence: Synthetic polynucleotide

SEQ ID NO: 5104 - protein, 9 aa, Artificial Sequence
  Description of Artificial Sequence: Synthetic peptide
MQALQTPRV

SEQ ID NO: 5105 - DNA, 343 bp, Artificial Sequence
  Description of Artificial Sequence: Synthetic polynucleotide
gtgcagtctggggctgaggtgaagaagcctgggtcctcggtgaaagtctcctgcaaggcttctggaggcaccttcagcaactatgctatcagctgggtgcgacaggcccctggacaagggcttgagtggatgggagggatcatccctatctttggtacaccaaactacgcacagaagtaccagggtaaagtcacgattaccgcggacgaatccacgagcacagcctacatggaactgagcagcctgagatctgaggacacggccgtgtattactgtgcgagagattccggaacaggagactttgcctactggggccagggaaccctggtcaccgtctcctcag

SEQ ID NO: 5106 - DNA, 355 bp, Artificial Sequence; identical to SEQ ID NO: 257
  Description of Artificial Sequence: Synthetic polynucleotide

SEQ ID NO: 5107 - protein, 11 aa, Artificial Sequence
  Description of Artificial Sequence: Synthetic peptide
ARDSGTGDFAY

SEQ ID NO: 5108 - DNA, 309 bp, Artificial Sequence
  Description of Artificial Sequence: Synthetic polynucleotide
  modified_base (12)..(12): a, c, t, g, unknown or other
cctgccccgtcncccctggagagccggcctccatctcctgcaggtctagtcacagcctcctgcataggagtggatacaactatttggattggtacctgcagaagccagggcagtctccacagctcctgatctatttgggttctaatcgggcctccggggtccctgacaggttcagtggcagtggatcaggcacagattttacactgaaaatcagcagagtggaggctgaggatgttggggtttattactgcatgcaagctctacaaactccgtggacgttcggccaagggaccaaggtggaaatcaaac

SEQ ID NO: 5109 - DNA, 337 bp, Artificial Sequence; identical to SEQ ID NO: 260
  Description of Artificial Sequence: Synthetic polynucleotide
  modified_base (40)..(40): a, c, t, g, unknown or other

SEQ ID NO: 5110 - protein, 9 aa, Artificial Sequence
  Description of Artificial Sequence: Synthetic peptide
MQALQTPWT

SEQ ID NO: 5111 - DNA, 350 bp, Artificial Sequence
  Description of Artificial Sequence: Synthetic polynucleotide
  modified_base (260)..(260): a, c, t, g, unknown or other
gtgcagctggtgcagtctgggcctgaggtgaagaagcctgggtcctcggtgaaggtctcctgcaaggtttctggaggcaacttcaacaactatgccatcagctgggtgcgacaggcccctggacaagggcttgagttgatgggagggatcatccctgtctttggtacacctaactacgcacagagattccagggcaaagtcacgattaccgcgcacgcatcaacgaacacagcttacatggagctgaataacctgagatntgaggacacggccatctattactgtgcgagagatgatggtttggggagttttggttactggggccagggaaccctggtcaccgtctcctc

SEQ ID NO: 5112 - DNA, 353 bp, Artificial Sequence; identical to SEQ ID NO: 485
  Description of Artificial Sequence: Synthetic polynucleotide
  modified_base (263)..(263): a, c, t, g, unknown or other

SEQ ID NO: 5113 - protein, 11 aa, Artificial Sequence
  Description of Artificial Sequence: Synthetic peptide
ARDDGLGSFGY

SEQ ID NO: 5114 - DNA, 328 bp, Artificial Sequence
  Description of Artificial Sequence: Synthetic polynucleotide
  modified_base (13)..(13): a, c, t, g, unknown or other
  modified_base (16)..(16): a, c, t, g, unknown or other
atgactcagtctncantctccctgcccgtcacccctggagagccggcctccatctcctgcaggtctagtcagagcctcctgcataggaatggagacaactatttggattggtacctgcagaagccagggcagtctccacagctcctaatctttttgggttctaatcgggcccccggggtccctgacaggttcagtggcagtggatcaggcacagattttacactgaaaatcagcagagtggaggctgaggatgttggggtttattactgcatgcaagctctacaaactcctcagacgttcggccaagggaccaaggtggaaatcaaac

SEQ ID NO: 5115 - DNA, 337 bp, Artificial Sequence; identical to SEQ ID NO: 488
  Description of Artificial Sequence: Synthetic polynucleotide
  modified_base (22)..(22): a, c, t, g, unknown or other
  modified_base (25)..(25): a, c, t, g, unknown or other

SEQ ID NO: 5116 - protein, 9 aa, Artificial Sequence
  Description of Artificial Sequence: Synthetic peptide
MQALQTPQT

SEQ ID NO: 5117 - DNA, 351 bp, Artificial Sequence
  Description of Artificial Sequence: Synthetic polynucleotide
tgcagctggtgcagtctggggctgaggtgaagaagcctgggtcctcggtgaaggtctcctgcaaggtttctggaggcaccttcaacacctttactatcagttgggtgcgacaggcccctggacaggggcttgagtacatgggaggaatcatccctgtctttggtacaccaaactacgcacggaagtaccagggcagagtcacaattaccgcggacgggtccacgagtacggcctacatggagctgaccagcctgaggtctgaggacacggccttctattactgtgcgagagacgggggtactgggagtgctgactactggggccagggaaccctggtcaccgtctcctcag

SEQ ID NO: 5118 - DNA, 355 bp, Artificial Sequence; identical to SEQ ID NO: 497
  Description of Artificial Sequence: Synthetic polynucleotide

SEQ ID NO: 5119 - protein, 11 aa, Artificial Sequence
  Description of Artificial Sequence: Synthetic peptide
ARDGGTGSADY

SEQ ID NO: 5120 - DNA, 329 bp, Artificial Sequence
  Description of Artificial Sequence: Synthetic polynucleotide
gatgactcagtctccagtctccctgcccgtcacccctggagagccggcctccatctcctgcaggtctagtcagagtctcctgcatagggatggaaacaactatttggattggtacctgcagaagccagggcagtctccacagctcctgatctattggggttctcatcgggcctccggggtccctgacaggttcagtggcagtggatcaggcacagattttacactgaagattaccagagtggaggctgaggatgttggggtttattactgcatgcaagctctacaaactccgtggacgttcggccaagggaccaaggtggaaatcaaac

SEQ ID NO: 5121 - DNA, 337 bp, Artificial Sequence; identical to SEQ ID NO: 500
  Description of Artificial Sequence: Synthetic polynucleotide

SEQ ID NO: 5122 - protein, 9 aa, Artificial Sequence
  Description of Artificial Sequence: Synthetic peptide
MQALQTPWT

SEQ ID NO: 5123 - DNA, 337 bp, Artificial Sequence
  Description of Artificial Sequence: Synthetic polynucleotide
tctggggctgaggtgaagaagcctgggtcctcggtgaaggtgtcatgcaaggcttctggaggcaacttcaggaaccatgctgtcacctgggtgcgacaggcccctggacagaggctcgagtggatgggagacatcatccctgcctttggtacagcaagatatgcacagaagtttcagggcagggtcacgattagcgcggacgaatccacgagcacagcctatttgcaactgaacagtctgagatctgaggacacggccatgttttattgtgcgagagaggacggtttggggagttatgactcctggggccagggtaccctggtcatcgtctcctcag

SEQ ID NO: 5124 - DNA, 355 bp, Artificial Sequence; identical to SEQ ID NO: 671
  Description of Artificial Sequence: Synthetic polynucleotide

SEQ ID NO: 5125 - protein, 11 aa, Artificial Sequence
  Description of Artificial Sequence: Synthetic peptide
AREDGLGSYDS

SEQ ID NO: 5126 - DNA, 330 bp, Artificial Sequence
  Description of Artificial Sequence: Synthetic polynucleotide
tgatgactcagtctccagtctccctgaccgtcacccctggagagccggcctccatctcctgcaggtctagtcagagcctcctccatagaagcggagacacctatttggattggtacctgcagaagccagggcagtctccacaactcctgatctatttgacttctaatcgggcctccggggtccctgacaggttcagtggcggtggatcaggcacagactttacactgaaaatcagcagagtggaggctggggatgttggagtttactactgcatgcaagctctacagactcctcgcacgttcggccaagggaccaggttggaaatcaaac

SEQ ID NO: 5127 - DNA, 337 bp, Artificial Sequence; identical to SEQ ID NO: 674
  Description of Artificial Sequence: Synthetic polynucleotide

SEQ ID NO: 5128 - protein, 9 aa, Artificial Sequence
  Description of Artificial Sequence: Synthetic peptide
MQALQTPRT

SEQ ID NO: 5129 - DNA, 355 bp, Artificial Sequence
  Description of Artificial Sequence: Synthetic polynucleotide
gtgcagctggtgcagtctggggctgaggtgaaggagcctgggtcctcggtgaaggtctcctgcaaggcttctggaggcaccttcagcaactatgatatcagctgggtgcgacaggcccctggacaagggcttgagtacatgggagggatcatccctatctttggtacagcaaactacgcacagaagttccagggcagagtcacgattaccgcggacgaatccacgagcacagcctacatggagctgagcagcctgagatctgaggactcggccgtgtattactgtgcgagagattcgggtgggacagctagctttgactactggggccagggaaccctggtcaccgtctcctcag

SEQ ID NO: 5130 - DNA, 358 bp, Artificial Sequence; identical to SEQ ID NO: 2099
  Description of Artificial Sequence: Synthetic polynucleotide

SEQ ID NO: 5131 - protein, 12 aa, Artificial Sequence
  Description of Artificial Sequence: Synthetic peptide
ARDSGGTASFDY

SEQ ID NO: 5132 - DNA, 309 bp, Artificial Sequence
  Description of Artificial Sequence: Synthetic polynucleotide
cctgccccgtcacccctggagagccggcctccatctcctgcaggtctagtcagagcctcctgcatagaaatggatacaactatttggattggtacctgcagaagccagggcagtctccacagctcctgatctatttgggttctaatcgggcctccggggtccctgacaggttcagtggcagtggatcaggcacagattttacactgaaaatcagcagagtggaggctgaggatgttggggtttattactgcatgcaagctctacaaactccgtggacgttcggccaagggaccaaggtggaaatcaaac

SEQ ID NO: 5133 - DNA, 337 bp, Artificial Sequence; identical to SEQ ID NO: 2102
  Description of Artificial Sequence: Synthetic polynucleotide

SEQ ID NO: 5134 - protein, 9 aa, Artificial Sequence
  Description of Artificial Sequence: Synthetic peptide
MQALQTPWT

SEQ ID NO: 5135 - DNA, 352 bp, Artificial Sequence
  Description of Artificial Sequence: Synthetic polynucleotide
gtgcagctggtgcagtctggggccgaggtgaagaagcctgggtcctcggtgaaggtctcctgtaaggcttctggaggcaccttcagcaacttcgctatacactgggtgcgacaggcccctggacagggccttgagtggatgggaagcctcatccctttctttgggacagcaaaatacgcacaaaagtttcagggcagagtcacgattaccgcggacgaatccacgagcacagcctacatggacttgcgcagcctgacatctgcggacacggccgtgtatttctgtgcgagacaagatggctatggttctctcgacgactggggccagggaaccctgctcagcgtctcctcag

SEQ ID NO: 5136 - DNA, 355 bp, Artificial Sequence; identical to SEQ ID NO: 2135
  Description of Artificial Sequence: Synthetic polynucleotide

SEQ ID NO: 5137 - protein, 11 aa, Artificial Sequence
  Description of Artificial Sequence: Synthetic peptide
ARQDGYGSLDD

SEQ ID NO: 5138 - DNA, 306 bp, Artificial Sequence
  Description of Artificial Sequence: Synthetic polynucleotide
tgcccgtcacccctggagagccggcctccatctcctgcaggtctagtcagagcctcctgcatagtagtggatacaactatttggattggtacctgcagaagccagggcagtctccacagctcctgatctatttgggttctaatcgggcctccggggtccctgacaggttcagtggcagtggatcaggcacagattttacactgaaaatcagtagagtggaggctgaggatgttgggatttattactgcatgcaaactctacagactccgttgacgttcggccaagggaccaaggtggaaatcaaac

SEQ ID NO: 5139 - DNA, 337 bp, Artificial Sequence; identical to SEQ ID NO: 2138
  Description of Artificial Sequence: Synthetic polynucleotide

SEQ ID NO: 5140 - protein, 9 aa, Artificial Sequence
  Description of Artificial Sequence: Synthetic peptide
MQTLQTPLT

SEQ ID NO: 5141 - DNA, 345 bp, Artificial Sequence
  Description of Artificial Sequence: Synthetic polynucleotide
tggtgcagtctggggctgaggtgaagaagcctgggtcctcggtgaaggtctcctgcaaggcttctggaggcacctttagtacctttgaaatcagctgggtgcgacaggcccctggactaggacttgagtggatgggagggatcatccctgtctttggctcaccaacctacgcacagcagttccacggcagagtcacaattaccgcggacgaatccacgaccacagcctacatggagttgaggagtctgagatctgaagacacggccgtctattactgtgcgagagtggacggtttagggagccatgacaactggggccagggaaccctggtcatcgtctccgcag

SEQ ID NO: 5142 - DNA, 355 bp, Artificial Sequence; identical to SEQ ID NO: 2741
  Description of Artificial Sequence: Synthetic polynucleotide

SEQ ID NO: 5143 - protein, 11 aa, Artificial Sequence
  Description of Artificial Sequence: Synthetic peptide
ARVDGLGSHDN

SEQ ID NO: 5144 - DNA, 308 bp, Artificial Sequence
  Description of Artificial Sequence: Synthetic polynucleotide
cctgcccgtcacccctggagagccggcctccatctcctgcaggtctagtcagagcctcctgcatcgtgatggatcccactatttggattggtacctgcagaagccagggcagtctccacagctcctgatctatttgggttctaatcgggcctccggggtccctgacaggttcagtggcagtggatcaggcacagattttacactgaaaatcagcagagtggaggctgaggatgttggggtttattactgcatgcaaactctacaaactcctcggacgttcggccaagggaccaaggtggaaatcaaac

SEQ ID NO: 5145 - DNA, 337 bp, Artificial Sequence; identical to SEQ ID NO: 2744
  Description of Artificial Sequence: Synthetic polynucleotide

SEQ ID NO: 5146 - protein, 9 aa, Artificial Sequence
  Description of Artificial Sequence: Synthetic peptide
MQTLQTPRT

SEQ ID NO: 5147 - DNA, 352 bp, Artificial Sequence
  Description of Artificial Sequence: Synthetic polynucleotide
gtgcagctggtgcagtctggggctgcggtgaagaagcctgggtcctcggtgaaggtctcctgcaaggcttctgggggcaccttcagcaactttgctatcaactgggtgcggcaggcacagggacaagggcttgagtggatgggaaacatcatccctttctttggtacagcaaactacgcacagacgttgcagggcagagtcacgattaccgcggacgtatccgcgagtacagcctacatggagttgaacagcctgagatctgaggacacggccatatattactgtgcgagagatgggggccacggtgacctagactactggggccagggatccctggtcaccgtctcctcag

SEQ ID NO: 5148 - DNA, 355 bp, Artificial Sequence; identical to SEQ ID NO: 2783
  Description of Artificial Sequence: Synthetic polynucleotide

SEQ ID NO: 5149 - protein, 11 aa, Artificial Sequence
  Description of Artificial Sequence: Synthetic peptide
ARDGGHGDLDY

SEQ ID NO: 5150 - DNA, 308 bp, Artificial Sequence
  Description of Artificial Sequence: Synthetic polynucleotide
cctgcccgtcacccctggagagccggcctccatctcctgcaggtctagtcagagcctcctgcatagaactggatacaactatttgagttggtatgtgcagaagccagggcagtctccacaggtcctgatctatttgggttctagtcgggcctccggggtccctgacaggttcagtggcagtggatcaggcacagattttacactgaaaatcagcagagtggaggctgaggatgttggggtttattactgcatgcaagctctacaaactccgtggacgttcggccaagggaccaaggtggaaatcaaac

SEQ ID NO: 5151 - DNA, 337 bp, Artificial Sequence; identical to SEQ ID NO: 2786
  Description of Artificial Sequence: Synthetic polynucleotide

SEQ ID NO: 5152 - protein, 9 aa, Artificial Sequence
  Description of Artificial Sequence: Synthetic peptide
MQALQTPWT

SEQ ID NO: 5153 - DNA, 352 bp, Artificial Sequence
  Description of Artificial Sequence: Synthetic polynucleotide
gtgcagctggtgcagtctggggctgaggtgaagaagcctgggtcctcggtgaaggtctcttgcaagtcttttggaggcaccttcgacaactatgctatcacctgggtgcgacaggcccctggacaagggcttgagtggatgggaaggatcatccctttctttcgtacgccaaactacgcacagagattgcagggcagattgacgattaccgcggacgaatctacgagcacagtctttatggagttgagcaggctgagatctgaggacacggccatgtattactgtacgagagatggcggtttagggagttttgactactggggccagggaaccctggtcaccgtctcctcag

SEQ ID NO: 5154 - DNA, 355 bp, Artificial Sequence; identical to SEQ ID NO: 2801
  Description of Artificial Sequence: Synthetic polynucleotide

SEQ ID NO: 5155 - protein, 11 aa, Artificial Sequence
  Description of Artificial Sequence: Synthetic peptide
TRDGGLGSFDY

SEQ ID NO: 5156 - DNA, 308 bp, Artificial Sequence
  Description of Artificial Sequence: Synthetic polynucleotide
cctgcccgtcacccctggagagccggcctccatctcctgcaggtctagccagagcctcgtgcatcggactggatacaactatttggattggtatctgcagaagccagggcagcctccacatctcctgatctatatgggttctaatcgggcctccggagtccctgacaggttcagtggcagtggatcaggcacagaattcacattgaagatcagcagagtggaggccgaggacgttggcatttattactgcatgcaagctctacaaactcctccgacgttcggccaagggaccaaggtggagatcaaac

SEQ ID NO: 5157 - DNA, 337 bp, Artificial Sequence; identical to SEQ ID NO: 2804
  Description of Artificial Sequence: Synthetic polynucleotide

SEQ ID NO: 5158 - protein, 9 aa, Artificial Sequence
  Description of Artificial Sequence: Synthetic peptide
MQALQTPPT

SEQ ID NO: 5159 - DNA, 355 bp, Artificial Sequence
  Description of Artificial Sequence: Synthetic polynucleotide
gtgcagctggtgcagtctggggctgaggtgaagaagcctgggtcctcggtgaaggtctcctgcaaggcttctggaggcacgttcagcaattatgctatgacttggttgcgacaggcccctggacaagggcttgaatggatgggagagatcatccctttctttcgtacaccaaaatacgcacagaagctgcagggcagactcacgattacagcggacgaatccacgagcactgtctacatggaccttaatagcctgagatctgaggacacggccgtctattactgtgcgagagatgggggggcttcagcgagttttgactactggggccagggaaccctggtcaccgtctcctcag

SEQ ID NO: 5160 - DNA, 358 bp, Artificial Sequence; identical to SEQ ID NO: 2411
  Description of Artificial Sequence: Synthetic polynucleotide

SEQ ID NO: 5161 - protein, 12 aa, Artificial Sequence
  Description of Artificial Sequence: Synthetic peptide
ARDGGASASFDY

SEQ ID NO: 5162 - DNA, 308 bp, Artificial Sequence
  Description of Artificial Sequence: Synthetic polynucleotide
cctgcccgtcacccctggagagccggcctccatctcctgcaggtctagtcagagcctcctgcataggagtggatacaactatttggattggtacctgcagaagccagggcagtctccacagctcctgatctatttgggttctaatcgggcctccggggtccctgacaggttcagtggcagtggatcaggcacagattttacactgaaaatcagcaaagtggaggctgaggatgttggggtttattactgcatgcaagctctacaaactcctcggacgttcggccaagggaccaaggtggaaatcaaac

SEQ ID NO: 5163 - DNA, 337 bp, Artificial Sequence; identical to SEQ ID NO: 2414
  Description of Artificial Sequence: Synthetic polynucleotide

SEQ ID NO: 5164 - protein, 9 aa, Artificial Sequence
  Description of Artificial Sequence: Synthetic peptide
MQALQTPRT

SEQ ID NO: 5165 - DNA, 398 bp, Artificial Sequence
  Description of Artificial Sequence: Synthetic polynucleotide
  modified_base (26)..(26): a, c, t, g, unknown or other
  modified_base (31)..(31): a, c, t, g, unknown or other
  modified_base (33)..(33): a, c, t, g, unknown or other
  modified_base (37)..(37): a, c, t, g, unknown or other
  modified_base (39)..(39): a, c, t, g, unknown or other
  modified_base (42)..(43): a, c, t, g, unknown or other
caaggagtctgttccgaggtgcagcnctaangngtcncngtnncaggtgcagctggtgcagtctggggctgagatgaagaagcctgggtcctcggtgaaggtctcctgcaaggcttctggaggcaccttcaacacctttgctatcagctgggtgcggcaggcccctggacaggggcttgagtggatgggaagcatcatccctatctttcgtacaacaaactacgcacagcaattccagggcagagtcacgataaccgcggacgaatccacgagctcagcctacatggagttgagcagcctcagatctgaagacacggccgtatattattgtgcgagggggcaatggctgggttcacttgactactggggccagggaaccctggtcaccgtctcctcag

SEQ ID NO: 5166 - DNA, 355 bp, Artificial Sequence; identical to SEQ ID NO: 2429
  Description of Artificial Sequence: Synthetic polynucleotide

SEQ ID NO: 5167 - protein, 11 aa, Artificial Sequence
  Description of Artificial Sequence: Synthetic peptide
ARGQWLGSLDY

SEQ ID NO: 5168 - DNA, 328 bp, Artificial Sequence
  Description of Artificial Sequence: Synthetic polynucleotide
  modified_base (16)..(16): a, c, t, g, unknown or other
atgactcagtctccantctccctgcccgtcacccctggagagccggcctccatctcctgcaggtctagtcagagtctcctgcataggagtggagacaactatttggattggtacctgcagaagccagggcagtctccacaactcctgatctatttgacttctaatcgggcctccggggtccctgacaggttcagtggcagtggatcaggcacagattttacactgaaaatcagcagagtggaggctgaggatgttggggtttattactgcatgcaagctctacaaactcctcggacgttcggccaagggaccaaggtggaaatcaaac

SEQ ID NO: 5169 - DNA, 337 bp, Artificial Sequence; identical to SEQ ID NO: 2432
  Description of Artificial Sequence: Synthetic polynucleotide
  modified_base (25)..(25): a, c, t, g, unknown or other

SEQ ID NO: 5170 - protein, 9 aa, Artificial Sequence
  Description of Artificial Sequence: Synthetic peptide
MQALQTPRT

SEQ ID NO: 5171 - DNA, 348 bp, Artificial Sequence
  Description of Artificial Sequence: Synthetic polynucleotide
tgcagctggtgcagtctggggctgaggtgaagaagcctgggtcctcggtgagggtctcctgtaaggtttctggaggcaccttcagcacgtacgctatcagctgggtgcgacaggcccctggacaagggattgagtggatgggacggatcatccctatatttggtacagcaaactacgcacagaaattccagggcagagtcacgattaccgcggacggatccacgagtacagcctacatggaactgagcagcctgagatctgacgacacggccgtgtattactgtgcgagagacagtgttacgatgctagaggactggggccagggaaccctggtcaccgtctcctcag

SEQ ID NO: 5172 - DNA, 352 bp, Artificial Sequence; identical to SEQ ID NO: 2453
  Description of Artificial Sequence: Synthetic polynucleotide

SEQ ID NO: 5173 - protein, 10 aa, Artificial Sequence
  Description of Artificial Sequence: Synthetic peptide
ARDSVTMLED

SEQ ID NO: 5174 - DNA, 309 bp, Artificial Sequence
  Description of Artificial Sequence: Synthetic polynucleotide
cctgccccgtcacccctggagagccggcctccatctcctgcaggtctagtcagagcctcctgagtagtaatggatataactatgtggattggtacctgcagaagccagggcaggctccacagctcgtgatctatttggcttctaatcgggcctccggggtccctgacaggttcagtggcagtggatcaggcacagattttgcactgaaaatcagcagagtggaggctgaggatgttggggtttattattgcatgcaagctctacaaactcctccgacgttcggccaagggaccagggtggaaatcaaac

SEQ ID NO: 5175 - DNA, 337 bp, Artificial Sequence; identical to SEQ ID NO: 2456
  Description of Artificial Sequence: Synthetic polynucleotide

SEQ ID NO: 5176 - protein, 9 aa, Artificial Sequence
  Description of Artificial Sequence: Synthetic peptide
MQALQTPPT

SEQ ID NO: 5177 - DNA, 352 bp, Artificial Sequence
  Description of Artificial Sequence: Synthetic polynucleotide
gtgcagctggtgcagtctggggctgcggtgaagaagcctgggtcctcggtgaaggtcgcctgcaaggcttctggaggcaacttcaggaattatgctatcgcctgggtgcgacaggcccctggacaagggctggagtggatgggagagatcatccctgtctttggtacaccaaagtacgcacagaagttccaggacagagtcacgattatcgcggacgaatccacgagcactggctacatggagctgaacagcctgcgatctgaggacacggccgtatattactgtgcgagagatgggggacaggcctcatttgactactggggccagggaaccctggtcaccgtctcctcag

SEQ ID NO: 5178 - DNA, 355 bp, Artificial Sequence; identical to SEQ ID NO: 3341
  Description of Artificial Sequence: Synthetic polynucleotide

SEQ ID NO: 5179 - protein, 11 aa, Artificial Sequence
  Description of Artificial Sequence: Synthetic peptide
ARDGGQASFDY

SEQ ID NO: 5180 - DNA, 306 bp, Artificial Sequence
  Description of Artificial Sequence: Synthetic polynucleotide
  modified_base (10)..(10): a, c, t, g, unknown or other
tgcccgtcanccctggagagccggcctccatctcctgcagatctagtcagagcctcctacatagaattggatacaactatttggattggtacctgcagaagccagggcagtctccacaactcctgatctatttgggttctaatcgggcctccggggtccctgacaggttcagtggcagtgggtcaggcacagattttacactgaaaatcagcagagtggaggctgaggatgttggggtttattactgcatgcaagctctacaaactcctcggacgttcggccaagggaccaaggtggaaatcaaac

SEQ ID NO: 5181 - DNA, 337 bp, Artificial Sequence; identical to SEQ ID NO: 3344
  Description of Artificial Sequence: Synthetic polynucleotide
  modified_base (41)..(41): a, c, t, g, unknown or other

SEQ ID NO: 5182 - protein, 9 aa, Artificial Sequence
  Description of Artificial Sequence: Synthetic peptide
MQALQTPRT

SEQ ID NO: 5183 - DNA, 351 bp, Artificial Sequence
  Description of Artificial Sequence: Synthetic polynucleotide
tgcagctggtgcagtctggggctgaggtgaagaagcctgggtcctcggtgaaggtctcctgcaaggcttctggaggccccttcagcaactatgctatcagctgggtgcgacaggcccctggacaaggctttgagtggatgggagggatcatccctgcctttggcactgcaaattatgcacggaggttccagggcagagtcacgattaccgcggacgaatccacgagcacagcctacatggagttgagaagcctgagatctgaggacacggccgtgtattattgtgcgagagatgcaggggtatcagtggctgactactggggccagggaaccctggtcaccgtctcctcag

SEQ ID NO: 5184 - DNA, 355 bp, Artificial Sequence; identical to SEQ ID NO: 2939
  Description of Artificial Sequence: Synthetic polynucleotide

SEQ ID NO: 5185 - protein, 11 aa, Artificial Sequence
  Description of Artificial Sequence: Synthetic peptide
ARDAGVSVADY

SEQ ID NO: 5186 - DNA, 308 bp, Artificial Sequence
  Description of Artificial Sequence: Synthetic polynucleotide
cctgcccgtcacccctggagagccggcctccatctcctgcaggtctagtcagagcctcctacatagaagtggatacacctatttgaattggtacctgcagaagccagggcagtctccacagctcctgatctatttgggatctaatcgggcctccggggtccctgacaggttcagtggcagtggatcaggcacagattttacactgaaaatcagcggagtggaggctgaggatgttggggtttattactgcatgcaagctctacaaactccgtggacgttcggccaagggaccaaggtggaaatcaaac

SEQ ID NO: 5187 - DNA, 337 bp, Artificial Sequence; identical to SEQ ID NO: 2942
  Description of Artificial Sequence: Synthetic polynucleotide

SEQ ID NO: 5188 - protein, 9 aa, Artificial Sequence
  Description of Artificial Sequence: Synthetic peptide
MQALQTPWT

SEQ ID NO: 5189 - DNA, 334 bp, Artificial Sequence
  Description of Artificial Sequence: Synthetic polynucleotide
ggggctgaggtgaagaagcctgggtcctccgtgaaggtctcctgcaagtcttctggaggcaccttcagcaactttcctctgagctgggtgcgacaggcccctggacaagggcttgagtggatgggagagatcatccctgcctttggcacaccaacgtacgcacagaagttccagggcagagtcacgattatcgcggacgcatctacgagtacatcctacatggacctgagaagcctgagatctgaggacacggccgtgtatttctgtgcgagagtcgacggtttggggtctctggccaactggggccagggaaccctggtcaccgtctcctcag

SEQ ID NO: 5190 - DNA, 355 bp, Artificial Sequence; identical to SEQ ID NO: 3029
  Description of Artificial Sequence: Synthetic polynucleotide

SEQ ID NO: 5191 - protein, 11 aa, Artificial Sequence
  Description of Artificial Sequence: Synthetic peptide
ARVDGLGSLAN

SEQ ID NO: 5192 - DNA, 329 bp, Artificial Sequence
  Description of Artificial Sequence: Synthetic polynucleotide
gatgactcagtctccagtctccctgcccgtcacccctggagagccggcctccatctcctgcaggtctagtcagagcctcctgcatcgtgatggaaacaactatttggattggtacctgcagaagccagggcagtctccacagctcctgatctacttggcttctaatcgggcctccggggtccctgacaggttcagtggcagtggatcaggcacagattttacactgaaaataagcagagtggaggctgaggatgttggggtttattactgcatgcaaactcgacaaactcctcggacgttcggccaagggaccaaggtggaaatcaaac

SEQ ID NO: 5193 - DNA, 337 bp, Artificial Sequence; identical to SEQ ID NO: 3032
  Description of Artificial Sequence: Synthetic polynucleotide

SEQ ID NO: 5194 - protein, 9 aa, Artificial Sequence
  Description of Artificial Sequence: Synthetic peptide
MQTRQTPRT

SEQ ID NO: 5195 - DNA, 355 bp, Artificial Sequence
  Description of Artificial Sequence: Synthetic polynucleotide
gtgcagctggtgcagtctggggcagaggtgaagaagcctgggtcctcggtgaaggtctcctgcaagtcttctggaggcatcttcagcaactatgatatcagctgggtgcgacaggcccctggacaagggcttgagtggatgggagggatcatccctctctttgggacagcaaactacgcacagaagttccagggcagactcacaattaccgcggacgaatccacgagcacagcctacatggagttgagtggcctgagagtggacgacacggccgtatattactgtgcgagagatgggggggcagcggcctcctttgactactggggccagggaaccctggtcaccgtctcgtcag

SEQ ID NO: 5196 - DNA, 358 bp, Artificial Sequence; identical to SEQ ID NO: 3869
  Description of Artificial Sequence: Synthetic polynucleotide

SEQ ID NO: 5197 - protein, 12 aa, Artificial Sequence
  Description of Artificial Sequence: Synthetic peptide
ARDGGAAASFDY

SEQ ID NO: 5198 - DNA, 308 bp, Artificial Sequence
  Description of Artificial Sequence: Synthetic polynucleotide
cctgcccgtcacccctggagagccggcctccatctcctgcaggtcgagtcagagcctcctgcatagaagtggatacacctatttggcttggtatctgcagaagccagggcagtctccacagctcctgatctatttggcctctaatcgggcctccggggtccctgacaggttcagtggcagtggatcaggcacagattttacactgaaaatcagcagagtggaggctgaggatgttggggtttattactgcatgcaagctctacaaactcctcggacgttcggccaagggaccaaggtggaaatcaaac

SEQ ID NO: 5199 - DNA, 337 bp, Artificial Sequence; identical to SEQ ID NO: 3872
  Description of Artificial Sequence: Synthetic polynucleotide

SEQ ID NO: 5200 - protein, 9 aa, Artificial Sequence
  Description of Artificial Sequence: Synthetic peptide
MQALQTPRT

SEQ ID NO: 5201 - DNA, 354 bp, Artificial Sequence
  Description of Artificial Sequence: Synthetic polynucleotide
tgcagctggtgcagtctggggctgaggtgaagaagcctgggtcctcggtgaaggtctcctgcaagtcttctggaggcaccttcagcaactttgctatcaattgggtgcgacaggcccctggacaggggcttgagtggatgggagggatcatccctttttttggttcagcaaaatacgcacagaaattcgagggcagagtcaggattaccgcggacgaatccaccagcacagcctacatggagctgaagagcctgagaaatgacgacacagccgtgtattactgtgcgcgagaggggggtgggagcccctcttttgaatactggggccagggaacccgggtcaccgtctcgtcag

SEQ ID NO: 5202 - DNA, 358 bp, Artificial Sequence; identical to SEQ ID NO: 4055
  Description of Artificial Sequence: Synthetic polynucleotide

SEQ ID NO: 5203 - protein, 12 aa, Artificial Sequence
  Description of Artificial Sequence: Synthetic peptide
AREGGGSPSFEY

SEQ ID NO: 5204 - DNA, 308 bp, Artificial Sequence
  Description of Artificial Sequence: Synthetic polynucleotide
cctgtccgtcacccctggagagccggcctccatctcctgcaggtctagtcagagcctcctgcataggagtggatacatctatttggattggtacttgcagaagccagggcagtctccacagctcctgatctacatgggttctaatcgggcctccggggtccctgacaggttcagtggcagtggatcaggcacagagtttacactgaaaatcagcagagtggaggctgaggatgttggggtttattactgcatgcaagctacacacactcctcggacgttcggccaagggaccaaggtggaaatcaaac

SEQ ID NO: 5205 - DNA, 337 bp, Artificial Sequence; identical to SEQ ID NO: 4058
  Description of Artificial Sequence: Synthetic polynucleotide

SEQ ID NO: 5206 - protein, 9 aa, Artificial Sequence
  Description of Artificial Sequence: Synthetic peptide
MQATHTPRT

SEQ ID NO: 5207 - DNA, 355 bp, Artificial Sequence
  Description of Artificial Sequence: Synthetic polynucleotide
gtgcagctggtgcagtctggggctgaggtgaagaagcctgggtcctcggtgaaggtctcctgcaaggcttctggaggcaccttcagcacctttgctatcaactgggtgcgacaggcccctggacaagggcttgagtggatgggggggctcatccctgtctttggtactccaaacctcgcacagaaattccagggcagagtcacgatgaccgcagacgaatctacgaccacagcctacatggaactgaacagcctgagatctgaggacacggccttttactactgtgcgagagaggggggtgggagcccctcatttgactactggggccagggaaccctggtcaccgtctcctcag

SEQ ID NO: 5208 - DNA, 358 bp, Artificial Sequence; identical to SEQ ID NO: 4043
  Description of Artificial Sequence: Synthetic polynucleotide

SEQ ID NO: 5209 - protein, 12 aa, Artificial Sequence
  Description of Artificial Sequence: Synthetic peptide
AREGGGSPSFDY

SEQ ID NO: 5210 - DNA, 307 bp, Artificial Sequence
  Description of Artificial Sequence: Synthetic polynucleotide
ctgcccgtcacccctggagagccggcctccatctcctgcaggtctagccagagcctcctgcatagtagtggctacatctatttggattggtacctgcagaagccagggcagtctccacagctcctgatttatatgggctctaatcgggcctccggggtccctgacaggttcagtggcagtggatcaggcacagattttacactgaaaatcagcagagtggaggctgaggatgttggggtttattactgcatgcaagctgtacaaactcctcggacgttcggccaagggaccaaggtggaaatcaaac

SEQ ID NO: 5211 - DNA, 337 bp, Artificial Sequence; identical to SEQ ID NO: 4046
  Description of Artificial Sequence: Synthetic polynucleotide

SEQ ID NO: 5212 - protein, 9 aa, Artificial Sequence
  Description of Artificial Sequence: Synthetic peptide
MQAVQTPRT

SEQ ID NO: 5213 - DNA, 347 bp, Artificial Sequence
  Description of Artificial Sequence: Synthetic polynucleotide
gtgcagctggtgcagtctggggctgaggtgaagaagcctgggtcatcggtgagggtctcctgcagggcctctggaggcaccttcagtcactatactatctcctgggtgcgacaggcccctggacaggggcttgagtggatgggaggcctcctcccgatctttggtacaacaaactacgcaaagagattccagggcagactcacgattaccgcggacgaatccacgagcacagcctacatggagctgagaagcctgagatttgatgacacagccgtttattactgtacgagagatacatttcacgtggctgactactggggccagggaaccctggtcaccgtctcctc

SEQ ID NO: 5214 - DNA, 350 bp, Artificial Sequence; identical to SEQ ID NO: 4067
  Description of Artificial Sequence: Synthetic polynucleotide

SEQ ID NO: 5215 - protein, 10 aa, Artificial Sequence
  Description of Artificial Sequence: Synthetic peptide
TRDTFHVADY

SEQ ID NO: 5216 - DNA, 309 bp, Artificial Sequence
  Description of Artificial Sequence: Synthetic polynucleotide
ccctgcccgtcacccctggagagccggcctccatctcctgcaggtctaatcagagcctcctgcatggtgatggatacaactatttggattggtacctgcagaagccagggcagtctccacaactcgtgatctatttgggttctaatcgggcctccggggtctccgacaggttcagtggcagtggatcaggcacagattttacactgaaaatcagcagagtggaggctgaggatgttggggtttatttttgcatgcaagctctacaaactccgtggacgttcggccaagggaccaaggtggacatcaaac

SEQ ID NO: 5217 - DNA, 337 bp, Artificial Sequence; identical to SEQ ID NO: 4070
  Description of Artificial Sequence: Synthetic polynucleotide

SEQ ID NO: 5218 - protein, 9 aa, Artificial Sequence
  Description of Artificial Sequence: Synthetic peptide
MQALQTPWT

SEQ ID NO: 5219 - DNA, 354 bp, Artificial Sequence
  Description of Artificial Sequence: Synthetic polynucleotide
tgcagctggtgcagtctggggctgaggtgaagaagcctgggtcctcggtgagggtctcctgcaaggcttctggaggcaccttcagtaactttgctatcagctgggtgcgacaggcccctggacaagggcttgagtggatgggaggggtcatccctctctttggtacaccaaactacgcacagaagttccagggcagagtcaccattaccgcggacgaatccacgagcacagcccacatggagctgagcagcctgagaagtgaggacacggccgtgtattactgtgcgagagaggggggagcagcagccgaatttgactactggggccagggaaccctggtcaccgtctcctcag

SEQ ID NO: 5220 - DNA, 358 bp, Artificial Sequence; identical to SEQ ID NO: 3215
  Description of Artificial Sequence: Synthetic polynucleotide

SEQ ID NO: 5221 - protein, 12 aa, Artificial Sequence
  Description of Artificial Sequence: Synthetic peptide
AREGGAAAEFDY

SEQ ID NO: 5222 - DNA, 306 bp, Artificial Sequence
  Description of Artificial Sequence: Synthetic polynucleotide
cctgcccgtcacccctggagagccggcctccatctcctgcaggtctagtcagagcctcctgcatagagatggatactactatttggattggtacctgcagaagccagggcagtctccacagctcctgatctatttgggttctaatcgggcctccggggtccctgacaggttcagtggcagtggatcaggcacagattttacactgaaaatcagcagagtggaggctgaagatgttggggtttattactgcatgcaagctctacaaactctccggacgttcggccaagggaccaaggtggaaatcaa

SEQ ID NO: 5223 - DNA, 335 bp, Artificial Sequence; identical to SEQ ID NO: 3740
  Description of Artificial Sequence: Synthetic polynucleotide

SEQ ID NO: 5224 - protein, 9 aa, Artificial Sequence
  Description of Artificial Sequence: Synthetic peptide
MQALQTLRT

SEQ ID NO: 5225 - DNA, 340 bp, Artificial Sequence
  Description of Artificial Sequence: Synthetic polynucleotide
cagtctggggctgagatgaagaagcctgggtcctcgttgaaggtctcctgcaaggcttctggaggcggcttcaataactatcctgtcatctgggtgcgacaggcccctggacaagggcttgagtggatgggggggatcatccctgtctttggtacacccaactacgcacagaagttcaagggcagagtcacgattaccgcggacgtatcttcaaatacagcctatgtgcacctgcgcagcctgacgactgacgacacggccgtgtattactgtgcgagaggtggagcctacggtgactacctatattggggccagggaaccctggtcgccgtctcctcag

SEQ ID NO: 5226 - DNA, 355 bp, Artificial Sequence; identical to SEQ ID NO: 419
  Description of Artificial Sequence: Synthetic polynucleotide

SEQ ID NO: 5227 - protein, 11 aa, Artificial Sequence
  Description of Artificial Sequence: Synthetic peptide
ARGGAYGDYLY

SEQ ID NO: 5228 - DNA, 296 bp, Artificial Sequence
  Description of Artificial Sequence: Synthetic polynucleotide
cctgtctgcatctgtaggagacagagtcaccatcacttgccaggcgagtcaggacattagcaactatttaaattggtatcagcaggaaccaggaaaagcccctaagctcctgatctacgatgcatccaatttggaaacaggggtcccatcaaggttcagtggaggtgggtctgggacagagtttactttcaccatcagcagtctacagcctgaagatattgcaacatattactgtcaacattatgattctctgccctcggtcactttcggcggagggaccaaggtggagatcaaac

SEQ ID NO: 5229 - DNA, 325 bp, Artificial Sequence; identical to SEQ ID NO: 422
  Description of Artificial Sequence: Synthetic polynucleotide

SEQ ID NO: 5230 - protein, 10 aa, Artificial Sequence
  Description of Artificial Sequence: Synthetic peptide
QHYDSLPSVT

SEQ ID NO: 5231 - DNA, 384 bp, Artificial Sequence
  Description of Artificial Sequence: Synthetic polynucleotide
  modified_base (4)..(4): a, c, t, g, unknown or other
  modified_base (6)..(7): a, c, t, g, unknown or other
  modified_base (9)..(9): a, c, t, g, unknown or other
  modified_base (19)..(19): a, c, t, g, unknown or other
  modified_base (21)..(21): a, c, t, g, unknown or other
  modified_base (23)..(26): a, c, t, g, unknown or other
  modified_base (28)..(28): a, c, t, g, unknown or other
cctntnnanagggggttcncntnnnnancaggtgcagctggtgcagtctggggctgaggtgaagaagcctgggtcctcggtgaaggtctcctgcaaggcttctggaggcaccttaagtacttatactgtcagttgggtgcgacaggcccctggacgagggcttgaatggatgggagggatcatccctgtctttggaacagcgaactacgcacagaggttccagggcagagtcacgattagtgcggacgaatccacgagcaccgtctacatggaactgaggagcctgaaatctgaggacacggccgtgtattattgtgcgagagatggtggagcagtggctggttacgcctactggggccagggaaccctggtcaccgtctcctc

SEQ ID NO: 5232 - DNA, 356 bp, Artificial Sequence; identical to SEQ ID NO: 689
  Description of Artificial Sequence: Synthetic polynucleotide

SEQ ID NO: 5233 - protein, 12 aa, Artificial Sequence
  Description of Artificial Sequence: Synthetic peptide
ARDGGAVAGYAY

SEQ ID NO: 5234 - DNA, 296 bp, Artificial Sequence
  Description of Artificial Sequence: Synthetic polynucleotide
cctgtctgcatctgtaggagacagagtcaccatcacttgccaggcgagtcaggacattaataactatgtaaattggtatcagcagaaaccaggaaaagcccctaatctcctgatctacgatgcatccaatttggaaacaggggtcccatcaaggttcagtggcagtgggtctgggacatattttactttcaccatcagcagcctacagcctgaagatgttgcaacatattactgtcaacagtatgctaatctccatgcgctcactttcggcggagggaccagggtggagatcaaac

SEQ ID NO: 5235 - DNA, 325 bp, Artificial Sequence; identical to SEQ ID NO: 692
  Description of Artificial Sequence: Synthetic polynucleotide

SEQ ID NO: 5236 - protein, 10 aa, Artificial Sequence
  Description of Artificial Sequence: Synthetic peptide
QQYANLHALT

SEQ ID NO: 5237 - DNA, 346 bp, Artificial Sequence
  Description of Artificial Sequence: Synthetic polynucleotide
gtgcagctggtgcagtctggggctgaggtgaagaagcctgggtcctcggtgaaggtctcctgcaaggtctctggaggcaccttcggtcactttgctatcagttgggtgcgacaggcccctggacaagggcttgagtggatgggagggatcatccctgtctttggatcaacacattacatacagaagttccagggcagaatctcgattaccgcggaccaatccacgcgcaccgcctatctggagctgagtagcctaagctctgaggacacggccatctattactgtgcgacaggctacagctatggtgactactggggccagggaaccctggtcaccgtctcctcag

SEQ ID NO: 5238 - DNA, 349 bp, Artificial Sequence; identical to SEQ ID NO: 1289
  Description of Artificial Sequence: Synthetic polynucleotide

SEQ ID NO: 5239 - protein, 9 aa, Artificial Sequence
  Description of Artificial Sequence: Synthetic peptide
ATGYSYGDY

SEQ ID NO: 5240 - DNA, 296 bp, Artificial Sequence
  Description of Artificial Sequence: Synthetic polynucleotide
cctgtctgcatctgtgggagacagagtcaccatcacctgccaggcgagtcaggacattaggaataatttaaattggtatcaacagaaaccagggaaagcccctaaactcctgatctacgatgcatccaatttggaaacaggggtctcatcaaggttcagtggaagtggatctgggacagatttcattttcaccatcaccagcctgcagcctgaagatattgcaacatattactgtcaacactataataatctccccctcgggactttcggcggagggaccaaggtggagttcaaac

SEQ ID NO: 5241 - DNA, 325 bp, Artificial Sequence; identical to SEQ ID NO: 1292
  Description of Artificial Sequence: Synthetic polynucleotide

SEQ ID NO: 5242 - protein, 10 aa, Artificial Sequence
  Description of Artificial Sequence: Synthetic peptide
QHYNNLPLGT

SEQ ID NO: 5243 - DNA, 372 bp, Artificial Sequence
  Description of Artificial Sequence: Synthetic polynucleotide
tgcagctggtgcagtctggggctgaggtgaagaagcctgggtcctcggtgagggtcgcctgcaaggcttcgggaggcaccttcagaagcaatgctgtcaactgggtgcgacaggcccctggacaagggtttgagtggatgggaggcatcatccctgtatctggaacaccaacctacgcacagaagttccaggggagggtcacgataaaggcggacgaatccacgagcacagtctacatggagatgagcagcctaagatctgaggacacggccatatattattgtgcgagaggcatccagaggtgggctagtggctacgaattcgtaactcttgactactggggccagggaaccctggtcaccgtctcctcag

SEQ ID NO: 5244 - DNA, 376 bp, Artificial Sequence; identical to SEQ ID NO: 2129
  Description of Artificial Sequence: Synthetic polynucleotide

SEQ ID NO: 5245 - protein, 18 aa, Artificial Sequence
  Description of Artificial Sequence: Synthetic peptide
ARGIQRWASGYEFVTLDY

SEQ ID NO: 5246 - DNA, 293 bp, Artificial Sequence
  Description of Artificial Sequence: Synthetic polynucleotide
cctgtctgcctctgtaggagacagagtcaccatcacttgccaagcgagtcagtacattagcatctatttaaattggtatcaacagaaggcagggaaagcccctaaactgctgatattcgatgcatccaatttgcaagcaggggtcccatcaaggttcagtggaagtgcatctgggacagagtttaccttgaccatcggcagcctgcagcctgaagatatcgcaacatattactgtcaacagtatgataatctcccgctcactttcggcggagggaccaaggtggagatcaaac

SEQ ID NO: 5247 - DNA, 322 bp, Artificial Sequence; identical to SEQ ID NO: 2132
  Description of Artificial Sequence: Synthetic polynucleotide

SEQ ID NO: 5248 - protein, 9 aa, Artificial Sequence
  Description of Artificial Sequence: Synthetic peptide
QQYDNLPLT

SEQ ID NO: 5249 - DNA, 337 bp, Artificial Sequence
  Description of Artificial Sequence: Synthetic polynucleotide
ggggctgaggtgaggaggcctgggtcctcggtgaaggtttcctgcaaggcgtttggaggcattttcggccaccatgctatcaactgggtgcgacaggcccctggacaagggcttgagtggatgggagggctcatccctgtctttggtacaccacactacgcacagaaattccagggcagagtcacgattaccgcggacgagtccacgagcacagcctacatggaactgagcagcctgaaatccgatgacacggccgtttattactgtgcgagaggggggggggcagtggctggtttgtgttactggggccagggaaccctggtcaccgtctcctcag

SEQ ID NO: 5250 - DNA, 358 bp, Artificial Sequence; identical to SEQ ID NO: 2501
  Description of Artificial Sequence: Synthetic polynucleotide

SEQ ID NO: 5251 - protein, 12 aa, Artificial Sequence
  Description of Artificial Sequence: Synthetic peptide
ARGGGAVAGLCY

SEQ ID NO: 5252 - DNA, 285 bp, Artificial Sequence
  Description of Artificial Sequence: Synthetic polynucleotide
catctgtaggagacagagtcaccatcacttgccaggcgagtcaggacataagaaattatttaaattggtatcagcagaaaccagggaaagcccctaagctcctgatttacgatgcatccaatttggaaacaggggtcccatcaaggttcagtggaagtggatctgggacagattttactttcaccatcagcagcctgcagcctgaagatattgcaacatattactgtcaacagtatgatagttttcttgccactttcggcggagggaccagggtggagatcaaac

SEQ ID NO: 5253 - DNA, 322 bp, Artificial Sequence; identical to SEQ ID NO: 2504
  Description of Artificial Sequence: Synthetic polynucleotide

SEQ ID NO: 5254 - protein, 9 aa, Artificial Sequence
  Description of Artificial Sequence: Synthetic peptide
QQYDSFLAT

SEQ ID NO: 5255 - DNA, 346 bp, Artificial Sequence
  Description of Artificial Sequence: Synthetic polynucleotide
gtgcagctggtgcagtctggggctgaggtgaagaagcctgagtcctcggtgaaggtctcctgcaaggcttctggaggcaccttcagtcactttcctattagctgggtgcgacaggcccctggacaagggcttgagtggttgggagggatcatccccatcttcagaacaacaaactacgcacagaagttccagggcagagtcacgattaccgcggacgaatccacgagtacagcctacatggagctgagcagcctgacatctgaggacacggccgtgtattactgtgcgacaggatacagctatggagactattggggccagggaaccctggtcaccgtctcctcag

SEQ ID NO: 5256 - DNA, 349 bp, Artificial Sequence; identical to SEQ ID NO: 2723
  Description of Artificial Sequence: Synthetic polynucleotide

SEQ ID NO: 5257 - protein, 9 aa, Artificial Sequence
  Description of Artificial Sequence: Synthetic peptide
ATGYSYGDY

SEQ ID NO: 5258 - DNA, 293 bp, Artificial Sequence
  Description of Artificial Sequence: Synthetic polynucleotide
cctgtctgcatctgtaggagacagagtcaccatcacttgtcaggcgagtcaggacattaccaagtacttaagttggtatcagcagaaaccagggaaagcccctaagctcctgatctacgatgcatccaatttggaaacaggggtcccatcaaggttcagtggaagtggatctgggacacattttaccttcaccatcagcagcctgcagcctgaagatattgcgacctattactgtcaacactatgataatctaccctcgctcactttcggcggagggaccaaggtggagctca

SEQ ID NO: 5259 - DNA, 322 bp, Artificial Sequence; identical to SEQ ID NO: 2726
  Description of Artificial Sequence: Synthetic polynucleotide

SEQ ID NO: 5260 - protein, 10 aa, Artificial Sequence
  Description of Artificial Sequence: Synthetic peptide
QHYDNLPSLT

SEQ ID NO: 5261 - DNA, 348 bp, Artificial Sequence
  Description of Artificial Sequence: Synthetic polynucleotide
gtgcagctggtgcagtctggggctgaggtgaagaagcctgggtcctcggtgaaagtctcctgcaaggcttctggaggcaccttcagcaactatgctttcaactgggtgcgacaggcccccggacaagggcttgagtggctgggagggatcatccctgcctttggaacaccaaactacgcacagaagttccagggcagagtcacacttaccgcggacgcgtcgacgagcacagtctatatggacctgagcagcctgagatctgaggacacggccctttattactgtgcgacagggggctatactttgtgtaactactggggccagggaaccctggtcaccgtctcctca

SEQ ID NO: 5262 - DNA, 351 bp, Artificial Sequence; identical to SEQ ID NO: 3311
  Description of Artificial Sequence: Synthetic polynucleotide

SEQ ID NO: 5263 - protein, 10 aa, Artificial Sequence
  Description of Artificial Sequence: Synthetic peptide
ATGGYTLCNY

SEQ ID NO: 5264 - DNA, 296 bp, Artificial Sequence
  Description of Artificial Sequence: Synthetic polynucleotide
cctgtctgcatctgtaggagacagagtcaccatcacttgccaggcgagtcaggacattaccaactatttaaattggtatcagcacaaaccaggggaagcccctaaactcctgatctacgatgcttccaatttggaaacaggggtcccatcaaggttcagtggaagtggatctgggacacattttactttcaccatcagcagcctgcagcctgaagacattgcaacatattactgtcagcactatgatagtctcccgtcgctcgctttcggcggagggaccaaggtggagatcaaac

SEQ ID NO: 5265 - DNA, 325 bp, Artificial Sequence; identical to SEQ ID NO: 3314
  Description of Artificial Sequence: Synthetic polynucleotide

SEQ ID NO: 5266 - protein, 10 aa, Artificial Sequence
  Description of Artificial Sequence: Synthetic peptide
QHYDSLPSLA

SEQ ID NO: 5267 - DNA, 349 bp, Artificial Sequence
  Description of Artificial Sequence: Synthetic polynucleotide
cagctggtgcagtctggggctgaggtgaagaagcctgggtcctcggtgaaggtctcctgcaaggcctctggaggcaccttcaccttcagcaactttcctatcagctgggtgcgacaggtccctggacaagggcttgagtgggtgggagggattctccctgtctttggtacaacaacctacgcacagaagtttcagggcagagtcacgattaccgcggacgaatccacgagcacagcctacatggagctgaccagcctcagatctgacgacacggcctactattactgtgcgactggatacagctatggtgactattggggccagggaaccctggtcatcgtctcctcag

SEQ ID NO: 5268 - DNA, 355 bp, Artificial Sequence; identical to SEQ ID NO: 3227
  Description of Artificial Sequence: Synthetic polynucleotide

SEQ ID NO: 5269 - protein, 9 aa, Artificial Sequence
  Description of Artificial Sequence: Synthetic peptide
ATGYSYGDY

SEQ ID NO: 5270 - DNA, 294 bp, Artificial Sequence
  Description of Artificial Sequence: Synthetic polynucleotide
tgtctgcatctgtaggagacagagtcaccatcacttgccaggcgagtcaggacattagcaactatttaaattggtttcagcagaaaccagggaaagcccctaagctcctgatctacgatgcatccaatttggaaacaggggtcccatcaaggttcagtggaagtggatctgggacagattttactttcaccatcagcagcctgcagcctgaagatattgcaacatattactgtcaacattatgataatctccctcggctcactttcggcggagggaccaaggtggagatcaaac

SEQ ID NO: 5271 - DNA, 325 bp, Artificial Sequence; identical to SEQ ID NO: 3230
  Description of Artificial Sequence: Synthetic polynucleotide

SEQ ID NO: 5272 - protein, 10 aa, Artificial Sequence
  Description of Artificial Sequence: Synthetic peptide
QHYDNLPRLT

SEQ ID NO: 5273 - DNA, 352 bp, Artificial Sequence
  Description of Artificial Sequence: Synthetic polynucleotide
gtgcagctggtgcagtctggggctgaggtgaagaagcctgggtcctcggtgaaggtctcctgcaaggcttctggaggcaccttcagccactatgcctacaactgggtgcgacaggcccctggacaagggcttgagtggatgggagggatcatccctgtctttgacacaataacgtacgcacagaagttccagggcagagtcacgattaccgcggacgagtctacggccacagcccacatggagctgagcagcctcagatctgaggacacggccgtgtattactgtgagagaagcggtggttctagcggatctgactactggggccagggaacccaggtcaccgtctcctcag

SEQ ID NO: 5274 - DNA, 355 bp, Artificial Sequence; identical to SEQ ID NO: 3251
  Description of Artificial Sequence: Synthetic polynucleotide

SEQ ID NO: 5275 - protein, 11 aa, Artificial Sequence
  Description of Artificial Sequence: Synthetic peptide
ERSGGSSGSDY

SEQ ID NO: 5276 - DNA, 296 bp, Artificial Sequence
  Description of Artificial Sequence: Synthetic polynucleotide
cctgtctgcatctgtgggagacagagtcaccatcacttgccaggcgagccaggacatcaataactatttaaattggtatcagaagaaaccagggaaagcccctaagctcctgatctacgatgcatccaatttggaaacaggggtcccatcaaggttcagtggaagtagatctgggacagattttactttcaccatcagcagcctgcagcctgaagatattgcaacatattactgtcaacagtatgataatctccctcggctcactttcggcggagggaccaaggtggagatcaaac

SEQ ID NO: 5277 - DNA, 325 bp, Artificial Sequence; identical to SEQ ID NO: 3254
  Description of Artificial Sequence: Synthetic polynucleotide

SEQ ID NO: 5278 - protein, 10 aa, Artificial Sequence
  Description of Artificial Sequence: Synthetic peptide
QQYDNLPRLT

SEQ ID NO: 5279 - DNA, 351 bp, Artificial Sequence
  Description of Artificial Sequence: Synthetic polynucleotide
tgcagctggtgcagtctggggctgaggtgaagaagcctgggtcgtcggtgaaggtctcctgcaaggcttctggaggcaccttcagccactatgctttcaactgggtgcgacaggcccctggacaaggacttgagtggatgggaggcatcatccctgtctttagaacaataaactacgcacagaggttccagggcagagtcaccattaccgcggacgaatccacgagcacagcctacatggagttgagcagtctgcgatctgaggacacggccgtgtattactgtgcgagagcaatgggatctactgggggggactactggggccagggaaccctggtcaccgtctcctcag

SEQ ID NO: 5280 - DNA, 355 bp, Artificial Sequence; identical to SEQ ID NO: 3335
  Description of Artificial Sequence: Synthetic polynucleotide

SEQ ID NO: 5281 - protein, 11 aa, Artificial Sequence
  Description of Artificial Sequence: Synthetic peptide
ARAMGSTGGDY

SEQ ID NO: 5282 - DNA, 294 bp, Artificial Sequence
  Description of Artificial Sequence: Synthetic polynucleotide
cctgtctgcatctataggagacagagtcaccatcacttgccaggcgagtcaggacattcgcaactatttaaattggtatcacctgaaatcagggaaggcccctcagctcctgatctacgatgcatccaatttggaaacaggtgtcccatcaaggttcagtggaagtggatctgggacacattttactttcaccatcagcagcctgcagcctgaagatattggaacatattactgtcaaaactataataatcgccctgagctcaccttcggcggagggaccaaggtggagatcaa

SEQ ID NO: 5283 - DNA, 323 bp, Artificial Sequence; identical to SEQ ID NO: 3338
  Description of Artificial Sequence: Synthetic polynucleotide

SEQ ID NO: 5284 - protein, 10 aa, Artificial Sequence
  Description of Artificial Sequence: Synthetic peptide
QNYNNRPELT

SEQ ID NO: 5285 - DNA, 346 bp, Artificial Sequence
  Description of Artificial Sequence: Synthetic polynucleotide
gtgcagctggtgcagtctggggctgaggtgaagaagcctgggtcctcggtgagggtctcctgcaaggcttctggaatcaccttcagccactttcctatcagctgggtgcgacaggcccctggacaagggcttgagtggatgggaggcatcatccctgtctttggtacaaaaaactacgcacagaagttccagggcagactcacgatcaccgcggacgaatccacgagtacagcctacatggagttgaggagcctgagatctgacgacacggccatttatttctgtgcgactggatacagttatggggactactggggccagggaaccctggtcaccgtctcctcag

SEQ ID NO: 5286 - DNA, 349 bp, Artificial Sequence; identical to SEQ ID NO: 3035
  Description of Artificial Sequence: Synthetic polynucleotide

SEQ ID NO: 5287 - protein, 9 aa, Artificial Sequence
  Description of Artificial Sequence: Synthetic peptide
ATGYSYGDY

SEQ ID NO: 5288 - DNA, 296 bp, Artificial Sequence
  Description of Artificial Sequence: Synthetic polynucleotide
cctgtctgcatctgtaggggacagagtcaccatcacttgccaggcgagtcaggacattaacaactatttaagttggtatcagcagaaaccagggaaagcccctaagctcctgatctacgatgcatccaatttggaaacaggggtcccatcgaggttcagtgggagtggatctgggacacattttactttcaccatcagcagcctgcagcctgaagatattgcaacatattactgtcaacactataataatctccccctcctcactttcggcggagggaccaaggtggagatcaaac

SEQ ID NO: 5289 - DNA, 325 bp, Artificial Sequence; identical to SEQ ID NO: 3038
  Description of Artificial Sequence: Synthetic polynucleotide

SEQ ID NO: 5290 - protein, 10 aa, Artificial Sequence
  Description of Artificial Sequence: Synthetic peptide
QHYNNLPLLT

SEQ ID NO: 5291 - DNA, 347 bp, Artificial Sequence
  Description of Artificial Sequence: Synthetic polynucleotide
gcagctggtgcagtctggggctgaggtgaagaagcctgggtcctcggtgaaggtctcctgcaaggcttctggaggcagcttcagcaactacgctatgacctgggtgcgacaggcccctggacaagggcttgagtggatgggagtgatcatacctacttttggtacaccaaactacgcacagaagttccagggcagagtcacgattaccgcggacgagtccacgaaaactgcctacatagaactgagcagtctgaggtctgaagacacggccgtatattactgtgtgacaggaggatatagtgcttacgattattggggccagggaaccctggtcaccgtctcctcag

SEQ ID NO: 5292 - DNA, 352 bp, Artificial Sequence; identical to SEQ ID NO: 4091
  Description of Artificial Sequence: Synthetic polynucleotide

SEQ ID NO: 5293 - protein, 10 aa, Artificial Sequence
  Description of Artificial Sequence: Synthetic peptide
VTGGYSAYDY

SEQ ID NO: 5294 - DNA, 293 bp, Artificial Sequence
  Description of Artificial Sequence: Synthetic polynucleotide
cctgtctgcatctgtaggagacagagtcaccatcacttgccaggcgagtcaggacgttaggcactatgtaaattggtttcagcagaaaccagggaaagcccctaagctcctgatctacgatggaaccaatttagatacaggggtcccatcaaggttcagtggaagtggatctgggacacattttactttcaccatcagcagcctgcagcctgaagatattgcaacatattactgtcaacggtatgatagactcccccccactttcggcggtgggaccaaggtggagatcaaac

SEQ ID NO: 5295 - DNA, 322 bp, Artificial Sequence; identical to SEQ ID NO: 4094
  Description of Artificial Sequence: Synthetic polynucleotide

SEQ ID NO: 5296 - protein, 9 aa, Artificial Sequence
  Description of Artificial Sequence: Synthetic peptide
QRYDRLPPT

SEQ ID NO: 5297 - DNA, 334 bp, Artificial Sequence
  Description of Artificial Sequence: Synthetic polynucleotide
ggggctgaggtgaagaagcctgggtcctcggtgaaggtctcctgcaaggcttctggaggcatcttcagcaattatgctatcaactgggtgcgacaggcccctggacaagggcttgagtggatgggagggatcatccctttctttggttcaccaaattatgcacagaagtttcggggcagagtcacgattaccgcggacgcctcaatgagcacagcctacatggaactgagcagcctgaaatctgacgacacggccgtctattattgtgcgagagcatatggggtcaccgggggggactactggggccagggaaccctggtcaccgtctcctcag

SEQ ID NO: 5298 - DNA, 355 bp, Artificial Sequence; identical to SEQ ID NO: 3785
  Description of Artificial Sequence: Synthetic polynucleotide

SEQ ID NO: 5299 - protein, 11 aa, Artificial Sequence
  Description of Artificial Sequence: Synthetic peptide
ARAYGVTGGDY

SEQ ID NO: 5300 - DNA, 296 bp, Artificial Sequence
  Description of Artificial Sequence: Synthetic polynucleotide
cctgtctgcatctgtaggagacagagtcaccatcacttgccaggcgagtcaggacattaccaactatttaaattggtatcagcagaaaccagggaaagcccctaaggtcctgatctacgatgcatccaatttggaaacaggggtcccatcaagattcagtggaagtggatctgggacactttttactttcaccatcaatagcctgcagcctgaagatgctgcaacatattactgtcaacagtacaatagtctcccttcgctcactttcggcggagggaccaaggtggagatcaaac

SEQ ID NO: 5301 - DNA, 325 bp, Artificial Sequence; identical to SEQ ID NO: 3788
  Description of Artificial Sequence: Synthetic polynucleotide

SEQ ID NO: 5302 - protein, 10 aa, Artificial Sequence
  Description of Artificial Sequence: Synthetic peptide
QQYNSLPSLT

SEQ ID NO: 5303 - DNA, 352 bp, Artificial Sequence
  Description of Artificial Sequence: Synthetic polynucleotide
gtgcagctggtgcagtctggggctgaggtgaggaagcctgggtcctcggtgaaggtctcctgcaaggcttctggaggcaccttcagtcactatggtatcagctgggtgcgacaggcccctggacaagggcttgagtggatgggagggatcatccctatctttggtacaagaaactacgcacagaagttccagggcagagtcacgattaccgcggacgaatccacgagcacagcctacatggacctgaacagcctgagatctgaagacacggccgtgtattactgtgcgagagagtttgggagtactggtggtcagtactggggccagggaaccctggtcaccgtctcctcag

SEQ ID NO: 5304 - DNA, 355 bp, Artificial Sequence; identical to SEQ ID NO: 3845
  Description of Artificial Sequence: Synthetic polynucleotide

SEQ ID NO: 5305 - protein, 11 aa, Artificial Sequence
  Description of Artificial Sequence: Synthetic peptide
AREFGSTGGQY

SEQ ID NO: 5306 - DNA, 296 bp, Artificial Sequence
  Description of Artificial Sequence: Synthetic polynucleotide
cctgtctgcatctgttggagacagagtcaccatcacttgccaggcgagtcaggacattagcaactatttaaattggtatcagcaaaaaccagggaaagcccctaagctcctgatctacgatgcatccaatttggaaacaggggtcccatcaagattcagtggaagtggatctgggacagatttttctttcaccatcagcagcctgcagcctgacgatattgcaacatattactgtcaacattataatagtctcccctcgctcactttcggcggagggaccaaggtggagatcaaac

SEQ ID NO: 5307 - DNA, 325 bp, Artificial Sequence; identical to SEQ ID NO: 3848
  Description of Artificial Sequence: Synthetic polynucleotide

SEQ ID NO: 5308 - protein, 10 aa, Artificial Sequence
  Description of Artificial Sequence: Synthetic peptide
QHYNSLPSLT

SEQ ID NO: 5309 - DNA, 352 bp, Artificial Sequence
  Description of Artificial Sequence: Synthetic polynucleotide
gtgcagctggtgcagtctggggctgaggtgaagaagcctgggtcctcggtgaaggtctcctgcaaggcttctggaggcaccttcagcaactatgctatcagctgggtgcgacaggcccctggacaagggcttgagtggattggagggatcatccctgcctttggaacaccaaagtacgcacataagttccagggcagagtcacaattagtgcggacgaatccacgagcacaggttacatggaactgagccgcctgagatccgacgacacggccgtttattactgtgcgagagattctggttacattagaggagactactggggccagggaaccctggtcaccgtctcctcag

SEQ ID NO: 5310 - DNA, 355 bp, Artificial Sequence; identical to SEQ ID NO: 3857
  Description of Artificial Sequence: Synthetic polynucleotide

SEQ ID NO: 5311 - protein, 11 aa, Artificial Sequence
  Description of Artificial Sequence: Synthetic peptide
ARDSGYIRGDY

SEQ ID NO: 5312 - DNA, 293 bp, Artificial Sequence
  Description of Artificial Sequence: Synthetic polynucleotide
  modified_base (102)..(102): a, c, t, g, unknown or other
cctgtctgcatctgtaggagacagagtcaccatcacttgccaggcgagtcaggggattaacacctatttaaattggtatcagcagaaaccagggaaagcccntaagctcctgatctacgatgcatccaatttggatacaggggtcccttctaggttcagtggaagtgggtctgggacagattttactttcaccatcagcagcctgcagcctgaagatattgcaacatattactgtcaacactatgatagtctgtcactcactttcggcggagggaccaaggtggagctcaaac

SEQ ID NO: 5313 - DNA, 322 bp, Artificial Sequence; identical to SEQ ID NO: 3860
  Description of Artificial Sequence: Synthetic polynucleotide
  modified_base (131)..(131): a, c, t, g, unknown or other

SEQ ID NO: 5314 - protein, 9 aa, Artificial Sequence
  Description of Artificial Sequence: Synthetic peptide
QHYDSLSLT

SEQ ID NO: 5315 - DNA, 352 bp, Artificial Sequence
  Description of Artificial Sequence: Synthetic polynucleotide
gtgcagctggtgcagtctgggactgaggtgaagaagcctgggtcctcggtaaaggtctcctgcaaggcttctgggggctccttcagcaactatgctatcagctgggtgcggcaggcccctggacaagggcttgagtggatgggagggatcctccctgtctttggtacaaaaaagtacgcacagaagttccaggacagagtcacgataaccgcggacgattccacgagcacggcctacatggagctgaggagcctgagatctgaggacacggccgtgtatttctgtgcgagagattccggttatattagaggagactactggggccagggaaccctggtcaccgtctcctcag

SEQ ID NO: 5316 - DNA, 355 bp, Artificial Sequence; identical to SEQ ID NO: 3965
  Description of Artificial Sequence: Synthetic polynucleotide

SEQ ID NO: 5317 - protein, 11 aa, Artificial Sequence
  Description of Artificial Sequence: Synthetic peptide
ARDSGYIRGDY

SEQ ID NO: 5318 - DNA, 293 bp, Artificial Sequence
  Description of Artificial Sequence: Synthetic polynucleotide
cctgtctgcatctgtaggagacagagtcaccatcacttgccaggcgagtcaggacagtaagaaccatgtaaattggtatcagcagaaaccagggaaagcccctaagctcctgatctacgaggcatctaatttggaagcgggggtcccatcaaggttcagtggaagtggatctgggacagattttagtttcaccatcagcagcctgcagcctgaagattttgcaacatattactgtctacactatgattctctcgcgctcactttcggcggagggaccaaggtggagatcaaac

SEQ ID NO: 5319 - DNA, 322 bp, Artificial Sequence; identical to SEQ ID NO: 3968
  Description of Artificial Sequence: Synthetic polynucleotide

SEQ ID NO: 5320 - protein, 9 aa, Artificial Sequence
  Description of Artificial Sequence: Synthetic peptide
LHYDSLALT

SEQ ID NO: 5321 - DNA, 346 bp, Artificial Sequence
  Description of Artificial Sequence: Synthetic polynucleotide
cagctggtgcagtctgggtctgaggtgaagaagcctgggtcctcggtgaaggtctcctgcaaggcttctggaggcaccttcagcacctatgctttcacctggttccgacaggcccctggaaaagggcttgagtggatgggaggagtaatccctgtatttggtacaccaaagtacgcacagaagttccagggcagagtcacgattaccgcgcatgaatccacgagaacagcctacatggagatgagcagcctgagatctgaggacacggccgtttattactgtgcgcgggggtatggtggcagctactatgactggggccagggaaccctggtcaccgtctcctcag

SEQ ID NO: 5322 - DNA, 352 bp, Artificial Sequence; identical to SEQ ID NO: 3725
  Description of Artificial Sequence: Synthetic polynucleotide

SEQ ID NO: 5323 - protein, 10 aa, Artificial Sequence
  Description of Artificial Sequence: Synthetic peptide
ARGYGGSYYD

SEQ ID NO: 5324 - DNA, 293 bp, Artificial Sequence
  Description of Artificial Sequence: Synthetic polynucleotide
cctgtctgcatctataggagacagagtcaccatcacttgccaggcgagtcaggacattagcaactatttaaattggtatcagcagaaaccaggtaaagcccctaagctcctgatctacgatgcttccaatttggaaacaggggtcccatccaggttcagtggaagtggatctgggacagattttactttcagcatcaccaacctgcagcctgaagatattgcaacttattactgtcaacagtatagtgatcccgcgctcactttcggcggggggaccaaggtggagatcaaac

SEQ ID NO: 5325 - DNA, 322 bp, Artificial Sequence; identical to SEQ ID NO: 3728
  Description of Artificial Sequence: Synthetic polynucleotide

SEQ ID NO: 5326 - protein, 9 aa, Artificial Sequence
  Description of Artificial Sequence: Synthetic peptide
QQYSDPALT

SEQ ID NO: 5327 - DNA, 382 bp, Artificial Sequence
  Description of Artificial Sequence: Synthetic polynucleotide
  modified_base (27)..(27): a, c, t, g, unknown or other
caggtgcagcccagatgggtcctgtcncaggtgcagctggtgcagtctggggctgaggtgaagaagcctgggtcctcggtgaaggtctcctgcaaggcttctggaggcaccttcagccactatacaattaactgggtgcgacaggcccctggacaagggcttgagtggatgggatcgatcatccctgtctttcgaacgacacagtacgcaccgaagttccagggcagagtcacacttagcgcggacgaatccacgagtacggcctacatggaggtgcgcagcctgagatctgaagacacggccgtctattactgtgcgaggaactttggttccacggggggacaatattggggccagggaaccctggtcaccgtctcctcag

SEQ ID NO: 5328 - DNA, 355 bp, Artificial Sequence; identical to SEQ ID NO: 231
  Description of Artificial Sequence: Synthetic polynucleotide

SEQ ID NO: 5329 - protein, 11 aa, Artificial Sequence
  Description of Artificial Sequence: Synthetic peptide
ARNFGSTGGQY

SEQ ID NO: 5330 - DNA, 293 bp, Artificial Sequence
  Description of Artificial Sequence: Synthetic polynucleotide
cctgtctgcttctgttggagacagagtcaccatcacttgccaggcgagtcaggacattagcaactatttaaattggtatcagcagaaacctgggaaagcccctaagctcctgatctacgacgcatcaaatttggagacaggggtcccatcaaggttcagtgggagtggatctgggacacattttagtttcaccatcagcagcctgcaggctgaagatattggcacatattactgtcaacagtatgacaatgtccggctcgctttcggcggggggaccaaggtggagatcaaac

SEQ ID NO: 5331 - DNA, 322 bp, Artificial Sequence; identical to SEQ ID NO: 4640
  Description of Artificial Sequence: Synthetic polynucleotide

SEQ ID NO: 5332 - protein, 9 aa, Artificial Sequence
  Description of Artificial Sequence: Synthetic peptide
QQYDNVRLA

SEQ ID NO: 5333 - DNA, 367 bp, Artificial Sequence
  Description of Artificial Sequence: Synthetic polynucleotide
ggggtcctgtcccaggtgcagctggtgcagtctggggctgaggtgaagaagcctgggtcctcggtgaaggtctcctgccaggcttctggaggcaccttcagcaactatgctatcaagtgggtgcgacaggcccctggacaagggtttgagtggatgggagggatcatccctttctttgccacaccgacctacgcacagaagttccagggcagagtcacgatcagcgcggacgaatccacgagcacagcctacatggagctgagcaacctgagatctgaggacacggccgtgtattattgtgcgaggagctatggttcgtcggggggagactactggggccagggaacccgggtcaccgtctcctcag

SEQ ID NO: 5334 - DNA, 355 bp, Artificial Sequence; identical to SEQ ID NO: 4649
  Description of Artificial Sequence: Synthetic polynucleotide

SEQ ID NO: 5335 - protein, 11 aa, Artificial Sequence
  Description of Artificial Sequence: Synthetic peptide
ARSYGSSGGDY

SEQ ID NO: 5336 - DNA, 293 bp, Artificial Sequence
  Description of Artificial Sequence: Synthetic polynucleotide
cctgtctgcatctgtaggagacagagtcaccatcacttgccaggcgagtcaggacattagcgactatttaaattggtatcagcaaaaaccagggaaagcccctaagctcttgatctacgatgcatccaatttggaaacaggggtcccatcaaggttcagtggaagtcgatctgggacacattttactttcaccatcagcagcctgcagcctgaagattttgcaacatattactgtcagcagtatgatgctctccggctcactttcggcggagggaccaaggtggacatcaaac

SEQ ID NO: 5337 - DNA, 322 bp, Artificial Sequence; identical to SEQ ID NO: 4712
  Description of Artificial Sequence: Synthetic polynucleotide

SEQ ID NO: 5338 - protein, 9 aa, Artificial Sequence
  Description of Artificial Sequence: Synthetic peptide
QQYDALRLT

SEQ ID NO: 5339 - DNA, 342 bp, Artificial Sequence
  Description of Artificial Sequence: Synthetic polynucleotide
agtctgggggaggcttggttcagcctggagggtccctgagactttcctgtgcagcctctggattcaccttcagtagttatgagatgaattgggtccgccaggctccagggaagggactggagtgggttgcatacattagtagtggttctacttccatatactacgcagactctgtggggggccgattcaccatctccagagacgacgccaagaacgtactatatttgcaaatgaagagcctgagagtcgaggacacggctatttattactgtgcgaggccgtttcttggttggggattttttgactcctggggccagggaaccctggtcaccgtctcctcag

SEQ ID NO: 5340 - DNA, 358 bp, Artificial Sequence; identical to SEQ ID NO: 353
  Description of Artificial Sequence: Synthetic polynucleotide

SEQ ID NO: 5341 - protein, 12 aa, Artificial Sequence
  Description of Artificial Sequence: Synthetic peptide
ARPFLGWGFFDS

SEQ ID NO: 5342 - DNA, 296 bp, Artificial Sequence
  Description of Artificial Sequence: Synthetic polynucleotide
cctgtctgcatctgtaggagacagagtcaccatcacttgccgggccagtgagagtattagtaggtggttggcctggtatcagcagaaaccagggaaagcccccaagctcctgatctataaggcgtctagtttagaaagtggggtcccaccaaggttcagcggcagtggatctgggacagagttcactctcaccatcagcggcctgcagcctgatgattttgcaacttattactgccaacagtataatactttttcggagatcactttcggcggggggaccaaggtggagatcaaac

SEQ ID NO: 5343 - DNA, 325 bp, Artificial Sequence; identical to SEQ ID NO: 356
  Description of Artificial Sequence: Synthetic polynucleotide

SEQ ID NO: 5344 - protein, 10 aa, Artificial Sequence
  Description of Artificial Sequence: Synthetic peptide
QQYNTFSEIT

SEQ ID NO: 5345 - DNA, 352 bp, Artificial Sequence
  Description of Artificial Sequence: Synthetic polynucleotide
tgcagctggtggagtctgggggaggcttggtacagcctggagggtccctgagactctcctgtgcagcctctggattcaccttcagtagttatgaaatgaactgggtccgccaggctccagggaaggggctggagtgggtctcatacattagtgacagtggcagtagtctgtactacaaagactctctggagggccgattcaccatctccagagacaacgccaagaactcactgtttctgcagatgaacagcctgagagccgaggacacggctgtttattactgtgcgagagccgggaaccactacaactactttgacttctggggccagggaaccctggtcaccgtctcctc

SEQ ID NO: 5346 - DNA, 356 bp, Artificial Sequence; identical to SEQ ID NO: 1943
  Description of Artificial Sequence: Synthetic polynucleotide

SEQ ID NO: 5347 - protein, 12 aa, Artificial Sequence
  Description of Artificial Sequence: Synthetic peptide
ARAGNHYNYFDF

SEQ ID NO: 5348 - DNA, 296 bp, Artificial Sequence
  Description of Artificial Sequence: Synthetic polynucleotide
cctgtctgcatctgtcggagacagagtcaccatcacttgccgggccagtcagagtattggtaggtggttggcctggtatcaccagaaaccaggaaaagcccctaagctcctgatctataaggcgtctaacttagaaagtggggtcccatcaaggttcagcggcagtggatccgggacagaattcactctcatcatcagcagcctgcagcctgatgattttgcaacttattactgccaacagtataatactttctctgctgtcactttcggcggagggaccaaggtgcagatcaaac

SEQ ID NO: 5349 - DNA, 325 bp, Artificial Sequence; identical to SEQ ID NO: 1946
  Description of Artificial Sequence: Synthetic polynucleotide

SEQ ID NO: 5350 - protein, 10 aa, Artificial Sequence
  Description of Artificial Sequence: Synthetic peptide
QQYNTFSAVT

SEQ ID NO: 5351 - DNA, 342 bp, Artificial Sequence
  Description of Artificial Sequence: Synthetic polynucleotide
agtctgggggaggcttggtacagcctggagggtccctaagactctcctgtgcagcctctggattcaccttcagtagttatgaaatgaactgggtccgccaggctccagggaaggggctggagtggctttcatacattagtgacagtggtagttccatatactacgcagactctgtgaagggccgattcaccatttccagagacaacgccaagaactcactgtatctgcaaatgaacagcctgagagccgaggacacggctgtttattattgtacgagaaatcaggataactggagctacttctactactggggccagggaaccctggtcaccgtctcctcag

SEQ ID NO: 5352 - DNA, 358 bp, Artificial Sequence; identical to SEQ ID NO: 1949
  Description of Artificial Sequence: Synthetic polynucleotide

SEQ ID NO: 5353 - protein, 12 aa, Artificial Sequence
  Description of Artificial Sequence: Synthetic peptide
TRNQDNWSYFYY

SEQ ID NO: 5354 - DNA, 296 bp, Artificial Sequence
  Description of Artificial Sequence: Synthetic polynucleotide
cctgtctgcatctgtaggagacagagtcaccatcacttgccggaccagtcagagtattagcagctggttggcctggtatcagcagaaaccagggaaagcccctaagctcctgatctataaggcgtctagtttagcaagtggggtcccatcaaggttcagcggcagtggatctgggacagaattcactctcaccatcagcagcctgcagcctgatgattttgcatcttattactgccaacaatataatacttattccgcgctcactttcggcggagggaccaaggtggagatcaaac

SEQ ID NO: 5355 - DNA, 325 bp, Artificial Sequence; identical to SEQ ID NO: 1952
  Description of Artificial Sequence: Synthetic polynucleotide

SEQ ID NO: 5356 - protein, 10 aa, Artificial Sequence
  Description of Artificial Sequence: Synthetic peptide
QQYNTYSALT

SEQ ID NO: 5357 - DNA, 343 bp, Artificial Sequence
  Description of Artificial Sequence: Synthetic polynucleotide
gagtctgggagcaaattggttcagcctggagggtccctaagactctcctgtgcagcctctggattcagcttccctgattatgaaatgaactgggtccgccaggctcccgggaaggggctggagtggattgcatacattagtagtggtggcaatgacatatactacgcagactctgtcaagggccgattcaccatctccagaaacgacaccaacaactccctatttctgcaaatgaacagccttagagccgaggacacggctttttattactgtgcgagaggtacagatcactacaatttttttcgccactggggccagggaaccctggtcaccgtctcctcag

SEQ ID NO: 5358 - DNA, 358 bp, Artificial Sequence; identical to SEQ ID NO: 2075
  Description of Artificial Sequence: Synthetic polynucleotide

SEQ ID NO: 5359 - protein, 12 aa, Artificial Sequence
  Description of Artificial Sequence: Synthetic peptide
ARGTDHYNFFRH

SEQ ID NO: 5360 - DNA, 293 bp, Artificial Sequence
  Description of Artificial Sequence: Synthetic polynucleotide
cctgtctgcatctataggagacagagtcaccatcacttgccgggccagtcagggtattaataggtggttggcctggtatcagcagaaaccagggaaagcccctaaactcctgatctataaggcgtctactttagaaagtggggtcccatcaagattcagtggcagtggatctgggacagaattcactctcaccatcagcagcctgcagcctgaggattttgcaacttatttctgccaacagtatttttccttttcccggctcactttcggcggagggaccaaggtggagatca

SEQ ID NO: 5361 - DNA, 322 bp, Artificial Sequence; identical to SEQ ID NO: 2078
  Description of Artificial Sequence: Synthetic polynucleotide

SEQ ID NO: 5362 - protein, 10 aa, Artificial Sequence
  Description of Artificial Sequence: Synthetic peptide
QQYFSFSRLT

SEQ ID NO: 5363 - DNA, 344 bp, Artificial Sequence
  Description of Artificial Sequence: Synthetic polynucleotide
ggagtctgggggaggcttggttcagcctggagggtccctgagactctcctgtgttgcctctggattcactttcggtccttatgaaatgaactgggtccgccaggctccagggaagggcctggagtggatttcatacattagtagtggtagtactgacatatactacgcagactctgtggagggccgattcaccatctccagagacgacgccaagcagtcactgtatttacaaatgaacagcctgagagccgaggacacggctgtttattattgtgtgagaccgaaggatcactacaacttttttgactactggggccagggaaccctggtcaccgtctcctcag

SEQ ID NO: 5364 - DNA, 358 bp, Artificial Sequence; identical to SEQ ID NO: 2147
  Description of Artificial Sequence: Synthetic polynucleotide

SEQ ID NO: 5365 - protein, 12 aa, Artificial Sequence
  Description of Artificial Sequence: Synthetic peptide
VRPKDHYNFFDY

SEQ ID NO: 5366 - DNA, 294 bp, Artificial Sequence
  Description of Artificial Sequence: Synthetic polynucleotide
tgtctgcatctgtaggagacagagtcaccatcacttgccgggccagtcagactattaataggtggttggcctggtaccagcagagaccagggaaagcccctaaactgctgatctataaggcttctagtttacaaactggggtcccgtcaaggttcagcggaagtggatctgggacagaattcactctcaccatcagcagcctgcagcctgacgatattgcaacttattactgccagcagtataatactttttctcggctcactttcggcggagggaccaagctggagatcaaac

SEQ ID NO: 5367 - DNA, 325 bp, Artificial Sequence; identical to SEQ ID NO: 2150
  Description of Artificial Sequence: Synthetic polynucleotide

SEQ ID NO: 5368 - protein, 10 aa, Artificial Sequence
  Description of Artificial Sequence: Synthetic peptide
QQYNTFSRLT

SEQ ID NO: 5369 - DNA, 343 bp, Artificial Sequence
  Description of Artificial Sequence: Synthetic polynucleotide
gagtctgggggaggcttggtacagcctggagggtccctgagactctcctgtgcagcctctggattcaacttcagaagttatgaaatgaattgggtccgccaggctccagggaaggggctggagtgggttgcatacattaatagtggtggtacttccacgtactctgcagagtctctgaagggccgattcaccatctccagagacgacgtcaagaattcactgtttctgcagatgaccagcctgacagccgaagacacggctgtttattactgtgcgagagccggggatggctacaattactttgacttctggggccagggcaccctggtcaccgtctcctcag

SEQ ID NO: 5370 - DNA, 358 bp, Artificial Sequence; identical to SEQ ID NO: 1865
  Description of Artificial Sequence: Synthetic polynucleotide

SEQ ID NO: 5371 - protein, 12 aa, Artificial Sequence
  Description of Artificial Sequence: Synthetic peptide
ARAGDGYNYFDF

SEQ ID NO: 5372 - DNA, 294 bp, Artificial Sequence
  Description of Artificial Sequence: Synthetic polynucleotide
tgtctgcatctgtgggagacagagtcaccatcacttgccgggccagtgagagtattagtagttggttggcctggtatcagcagaaaccagggagagcccctaagctcctaatctataaggcgtctagtttagtaagtggggtcccatcaaggttcagcggcagtggatctgggacaaaattcactctcaccatcagcagcctgcagcctgatgattttgcaacttattactgccaacagtataatacttattctcggctcactttcggcggagggaccaaggtggagatcaaac

SEQ ID NO: 5373 - DNA, 325 bp, Artificial Sequence; identical to SEQ ID NO: 1868
  Description of Artificial Sequence: Synthetic polynucleotide

SEQ ID NO: 5374 - protein, 10 aa, Artificial Sequence
  Description of Artificial Sequence: Synthetic peptide
QQYNTYSRLT

SEQ ID NO: 5375 - DNA, 344 bp, Artificial Sequence
  Description of Artificial Sequence: Synthetic polynucleotide
ggagtctgggggaggcttggtacagcctggagggtccctgagactctcctgtgcagcctctggattcagcttcagtacttatgaaatgaactgggtccgccaggctccagggaaggggctggagtgggtggcatatatcagtgacactgggagtaacatatactacgcagactctgtggggggccgattcaccatctccagagacaacgccaagaattcactgtatctgcaaatgagccgcctgagagccgaggacacggctgtttattactgtgcgagagccggaggtggctacaattatcttgaccagtggggccagggaaccctggtcaccgtctcctcag

SEQ ID NO: 5376 - DNA, 358 bp, Artificial Sequence; identical to SEQ ID NO: 1889
  Description of Artificial Sequence: Synthetic polynucleotide

SEQ ID NO: 5377 - protein, 12 aa, Artificial Sequence
  Description of Artificial Sequence: Synthetic peptide
ARAGGGYNYLDQ

SEQ ID NO: 5378 - DNA, 296 bp, Artificial Sequence
  Description of Artificial Sequence: Synthetic polynucleotide
cctgtctgcatctgtaggagacagagtcaccatcacttgccgggccagtcagaatattgttaggtggttggcctggtatcagcagaagccagggaaagcccctaagctcctgatctataaggcgtctagtttagaaagtggggtcccatcaaggttcagcggcagtggatctggaacagaattcactctcaccatcagcagcctgcagcctgatgattttgcaacttattactgccaacagtataatacttattccaggctcactttcggcggtgggaccaaggtggagatcaaac

SEQ ID NO: 5379 - DNA, 325 bp, Artificial Sequence; identical to SEQ ID NO: 1892
  Description of Artificial Sequence: Synthetic polynucleotide

SEQ ID NO: 5380 - protein, 10 aa, Artificial Sequence
  Description of Artificial Sequence: Synthetic peptide
QQYNTYSRLT

SEQ ID NO: 5381 - DNA, 345 bp, Artificial Sequence
  Description of Artificial Sequence: Synthetic polynucleotide
tggagtctgggggaggcttggtacagcctggagggtccctgagactctcctgtgtagcctctggattcaccttcagtagttatgaaatgaactgggtccgccaggctccagggaagggtctggagtgggtttcatacattagcagtggtggtaatctcgtgtactacgcaggctccgtggagggccgattcaccgtctccagagacgacgccaacaacacactgtttttgcaaatgaaccgcctgagagacgaggacacggctatttattactgtgcgagacctagaaatcactacaacctctttgactactggggccagggaaccctggtcaccgtctcctcag

SEQ ID NO: 5382 - DNA, 358 bp, Artificial Sequence; identical to SEQ ID NO: 2417
  Description of Artificial Sequence: Synthetic polynucleotide

SEQ ID NO: 5383 - protein, 12 aa, Artificial Sequence
  Description of Artificial Sequence: Synthetic peptide
ARPRNHYNLFDY

SEQ ID NO: 5384 - DNA, 296 bp, Artificial Sequence
  Description of Artificial Sequence: Synthetic polynucleotide
cctgtctgcatctgtaggagacagagtcaccatcacttgccgggccagtgagaatattaggagctggttggcctggtatcagcagaaaccagggaaagcccctaaactcttgatctataaggcgtcttctttagaaagtggggtcccatcaaggttcagcggcagtggatctgggacagaattcactctcaccatcagcagcctgcggcctgatgactttgcaacttactactgccaacaatataatacttattccgcgctcactttcggcggagggaccaaggtggagatcaaac

SEQ ID NO: 5385 - DNA, 325 bp, Artificial Sequence; identical to SEQ ID NO: 2420
  Description of Artificial Sequence: Synthetic polynucleotide

SEQ ID NO: 5386 - protein, 10 aa, Artificial Sequence
  Description of Artificial Sequence: Synthetic peptide
QQYNTYSALT

SEQ ID NO: 5387 - DNA, 353 bp, Artificial Sequence
  Description of Artificial Sequence: Synthetic polynucleotide
gcagctggtggagtctgggggcggcttggtgcagcctggagggtccctgagactctcctgtgcagcctctggattcattttcagtaactatgagatgaactgggtccgtcaggcaccagggaagggactggaatggatttcatacatcagtgatagtagtagtaattttcatcaggcagactctgtgaggggccgattcagcatctccagagacaacgccaagaattcactgtatctgcaaatggacagcctgagggccgaggacacgggtgtttattactgtgcgagaagtagagatcactacaattgttttgactactggggccagggaaccctggtcaccgtctcctcag

SEQ ID NO: 5388 - DNA, 358 bp, Artificial Sequence; identical to SEQ ID NO: 2621
  Description of Artificial Sequence: Synthetic polynucleotide

SEQ ID NO: 5389 - protein, 12 aa, Artificial Sequence
  Description of Artificial Sequence: Synthetic peptide
ARSRDHYNCFDY

SEQ ID NO: 5390 - DNA, 296 bp, Artificial Sequence
  Description of Artificial Sequence: Synthetic polynucleotide
cctgtctgcatctgtaggagacagagtcaccatcacttgccgggccagtcagagtattagtaggtggttggcctggtatcaacagacaccagggaaagcccctaaactcctgatctatagggcgtctagtttagaaactggggtctcatcaaggttcagcggcagtggatctgggacagaattcactctcaccatcaacagcctgcagcctgaagattttgcaacttattactgccaacagtataatacttactctgcactcactttcggcggagggaccaaggtggagatcaaac

SEQ ID NO: 5391 - DNA, 325 bp, Artificial Sequence; identical to SEQ ID NO: 2624
  Description of Artificial Sequence: Synthetic polynucleotide

SEQ ID NO: 5392 - protein, 10 aa, Artificial Sequence
  Description of Artificial Sequence: Synthetic peptide
QQYNTYSALT

SEQ ID NO: 5393 - DNA, 354 bp, Artificial Sequence
  Description of Artificial Sequence: Synthetic polynucleotide
tgcagctggtggagtctgggggaggcttggtacagcctggagggtccctgagactctcctgtgcagcctctggattcaccttcagtagttatgaaatgaattgggtccgccaggctccagggaaggggctggagtgggtttcatacattagtgatagtggtagtgacatatactacgcagactctctaaagggccgattcaccatctccagagacaacgccaagaactcactgtatctgcaaatgaacagcctgagagccgaggacacggccatttattactgtgcgagaagtagacataactacaattgtcttgactactggggccagggaaccctggtcaccgtctcctcag

SEQ ID NO: 5394 - DNA, 358 bp, Artificial Sequence; identical to SEQ ID NO: 2639
  Description of Artificial Sequence: Synthetic polynucleotide

SEQ ID NO: 5395 - protein, 12 aa, Artificial Sequence
  Description of Artificial Sequence: Synthetic peptide
ARSRHNYNCLDY

SEQ ID NO: 5396 - DNA, 297 bp, Artificial Sequence
  Description of Artificial Sequence: Synthetic polynucleotide
  modified_base (127)..(127): a, c, t, g, unknown or other
  modified_base (211)..(211): a, c, t, g, unknown or other
ccctgtctgcatctgtaggagacagagtcaccatcacttgccgggccagtgagagtattagtaggtggttggcctggtatcagcagaaaccagggaaagcccctaagctcctgatatataaggcgtntaatttagaaagtggggtcccatcaaggtttagcggcagtggatctgggacagaattcactctcaccatcagcagcctgcagcntgatgattttgcaacttattactgccaacagtataatactttttctgagctcacttttggccgagggaccaaggtggagatcaaac

SEQ ID NO: 5397 - DNA, 325 bp, Artificial Sequence; identical to SEQ ID NO: 2642
  Description of Artificial Sequence: Synthetic polynucleotide
  modified_base (155)..(155): a, c, t, g, unknown or other
  modified_base (239)..(239): a, c, t, g, unknown or other

SEQ ID NO: 5398 - protein, 10 aa, Artificial Sequence
  Description of Artificial Sequence: Synthetic peptide
QQYNTFSELT

SEQ ID NO: 5399 - DNA, 355 bp, Artificial Sequence
  Description of Artificial Sequence: Synthetic polynucleotide
gtgcagctggtggagtctgggggaggcttggtacagcctggagggtccctgagactctcctgtgtagcctctggattcagtttcagtggttatgaaatgaactgggtccgccaggctccggggaagggactggagtgggtctcatatatcagtgatagtggcagtgacacatactacgcagtctctctggggggccgtttcaccgtctccagagacaacgccaagaactcagtgtatctgcaaatgaccagcctgagagccgaggacacggctatttattactgtgcgagatcgcgagataagtacaatctctttgaccactggggccagggaaccctggtcaccgtctcctcag

SEQ ID NO: 5400 - DNA, 358 bp, Artificial Sequence; identical to SEQ ID NO: 2363
  Description of Artificial Sequence: Synthetic polynucleotide

SEQ ID NO: 5401 - protein, 12 aa, Artificial Sequence
  Description of Artificial Sequence: Synthetic peptide
ARSRDKYNLFDH

SEQ ID NO: 5402 - DNA, 292 bp, Artificial Sequence
  Description of Artificial Sequence: Synthetic polynucleotide
  modified_base (25)..(25): a, c, t, g, unknown or other
ctgtctgcatctgtaggagacagantcaccatcacctgccgggccagtcagtatattaagacttggttggcctggtatcagcagaaaccagggagacccccaaagctcctgatctacaaggcgtctagtttagaaactggggtcccatcaagattcagcggcagtggatctgggacacaattcactctcaccatcagcagcctgcagcctgatgattttgcaacttactactgtcaacagtataatactttttctcagatcactttcggcggagggaccaaggtagagatca

SEQ ID NO: 5403 - DNA, 322 bp, Artificial Sequence; identical to SEQ ID NO: 2366
  Description of Artificial Sequence: Synthetic polynucleotide
  modified_base (55)..(55): a, c, t, g, unknown or other

SEQ ID NO: 5404 - protein, 10 aa, Artificial Sequence
  Description of Artificial Sequence: Synthetic peptide
QQYNTFSQIT

SEQ ID NO: 5405 - DNA, 334 bp, Artificial Sequence
  Description of Artificial Sequence: Synthetic polynucleotide
tctggggctgaggtgaagaagcctgggtcctcggtgaaggtctcctgcaagacttctggagacagcttcagcaccaatactatcagctgggtgcgacaggcccctggacaagggcttgagtggatgggcgggatcatccctgtctttggaacaccaaattacgcacagaaattccagggcagagtcagaattaccgcggacgaatccacgagcacagcctacatggagctgagcagcctgagatctgaggacacggccgtatatttctgtgcgagaaaggggggttgggcgtataactactggggccagggaaccctggtcaccgtctcctcag

SEQ ID NO: 5406 - DNA, 352 bp, Artificial Sequence; identical to SEQ ID NO: 593
  Description of Artificial Sequence: Synthetic polynucleotide

SEQ ID NO: 5407 - protein, 10 aa, Artificial Sequence
  Description of Artificial Sequence: Synthetic peptide
ARKGGWAYNY

SEQ ID NO: 5408 - DNA, 314 bp, Artificial Sequence
  Description of Artificial Sequence: Synthetic polynucleotide
  modified_base (17)..(17): a, c, t, g, unknown or other
gatgacccagtctccantctccctgtctgcatctgtgggagacagagtcaccatcacttgccaggcgagtcaagacattagtaactatttaaattggtatcagcagaaaccagggaaagcccctaaggccctgatctacgatgcatcgaatttggaaacaggggtcccatcaaggttcagtggaagtggatctgggacagattttactttcaccatcagcagcctgcagcctgaagattttgcaacatattactgtcagcagtatgctaatctccccgacacttttggccaggggaccaagctggagatcaaac

SEQ ID NO: 5409 - DNA, 322 bp, Artificial Sequence; identical to SEQ ID NO: 596
  Description of Artificial Sequence: Synthetic polynucleotide
  modified_base (25)..(25): a, c, t, g, unknown or other

SEQ ID NO: 5410 - protein, 9 aa, Artificial Sequence
  Description of Artificial Sequence: Synthetic peptide
QQYANLPDT

SEQ ID NO: 5411 - DNA, 337 bp, Artificial Sequence
  Description of Artificial Sequence: Synthetic polynucleotide
tctggggctgaagtgaagaagcctgggtcctcggtgagggtctcctgccaggcttctggagacaccttcagcaattatgctatcagctgggtgcgacaggcccctggacaagggcttgagtggatgggagggatcatccctatgtttgatacaccacactacgcacagaggttccagggcagagtcagcataaccgcggacgaatccacgagcacagcctacatggagctgagctggctgagatctgaggacacggccgtatattactgtgtgcgagatagtggctatatccggtttgactactggggccagggaaccctggtcaccgtctcctcag

SEQ ID NO: 5412 - DNA, 355 bp, Artificial Sequence; identical to SEQ ID NO: 623
  Description of Artificial Sequence: Synthetic polynucleotide

SEQ ID NO: 5413 - protein, 11 aa, Artificial Sequence
  Description of Artificial Sequence: Synthetic peptide
VRDSGYIRFDY

SEQ ID NO: 5414 - DNA, 294 bp, Artificial Sequence
  Description of Artificial Sequence: Synthetic polynucleotide
ccctgtctgtatctgtaggagacagagtcaccatcacttgccaggcgagtcaggacatcagcaactctgtaaattggtttcagcagaaaccagggaaagcccctaaactcctgatctacgatgcatccaatttggaaacaggggtcccatcaaggttcagtggaagtggatctgggacagattttactttcaccatcatcagcctgcagcctgaagatattgcaacatattattgtcaacagtatgataaactctcgtccacttttggccaggggaccaagctggagatgaaac

SEQ ID NO: 5415 - DNA, 322 bp, Artificial Sequence; identical to SEQ ID NO: 626
  Description of Artificial Sequence: Synthetic polynucleotide

SEQ ID NO: 5416 - protein, 9 aa, Artificial Sequence
  Description of Artificial Sequence: Synthetic peptide
QQYDKLSST

SEQ ID NO: 5417 - DNA, 355 bp, Artificial Sequence; identical to SEQ ID NO: 1463
  Description of Artificial Sequence: Synthetic polynucleotide

SEQ ID NO: 5418 - DNA, 355 bp, Artificial Sequence; identical to SEQ ID NO: 1463
  Description of Artificial Sequence: Synthetic polynucleotide

SEQ ID NO: 5419 - protein, 11 aa, Artificial Sequence
  Description of Artificial Sequence: Synthetic peptide
ARDGGYSHGDY

SEQ ID NO: 5420 - DNA, 294 bp, Artificial Sequence
  Description of Artificial Sequence: Synthetic polynucleotide
ccctgtctgcatctgtaggagccagagtcaccatcacttgccaggcgagtcaggacatcaagaactatttaaattggtatcagcagaaaccaggaaaagcccctaacctcctgatctacgaggcatccaacttgcaaacaggggtcccatcaaggttcagtggaagtggatctgggacaaattttatttttaccatcagcagcctgcagcctgaagacattgcaacatattactgtcaacagtatgataatcgccctcgaacttttggccaggggaccaggctggagatcaaac

SEQ ID NO: 5421 - DNA, 322 bp, Artificial Sequence; identical to SEQ ID NO: 1466
  Description of Artificial Sequence: Synthetic polynucleotide

SEQ ID NO: 5422 - protein, 9 aa, Artificial Sequence
  Description of Artificial Sequence: Synthetic peptide
QQYDNRPRT

SEQ ID NO: 5423 - DNA, 344 bp, Artificial Sequence
  Description of Artificial Sequence: Synthetic polynucleotide
gcagctggtgcagtctggggctgaggtgaagaagcctgggtcctcggtgaaggtctcctgcagggtatctggaggcaccttcaacacctatcctatcagctgggtgcgacaggcccctggacaagggcttgagtggatgggagggatcatccctgtctttggtacagtaaactacgcacagaagttcaagggcagagtcaccattaccgcggacgaatccacgagcacagcctacatggaactgagcagcctgagatctgaagacacggccgtctattattgtgcgaggggatacagttatggtgactactggggccagggaaccctgatcaccgtctcctcag

SEQ ID NO: 5424 - DNA, 349 bp, Artificial Sequence; identical to SEQ ID NO: 1151
  Description of Artificial Sequence: Synthetic polynucleotide

SEQ ID NO: 5425 - protein, 9 aa, Artificial Sequence
  Description of Artificial Sequence: Synthetic peptide
ARGYSYGDY

SEQ ID NO: 5426 - DNA, 296 bp, Artificial Sequence
  Description of Artificial Sequence: Synthetic polynucleotide
cctgtctgcatctgttggagacagagtcaccatcacttgccaggcgagtcaggacattagaaactatgtaaattggtatcagcagaaaccagggaaagccccaaagctcctgatctacgatgcatccaatttggaaacaggggtcccatcaaggttcagtgcaagaggatctgggacacattttactttcaccatcagcagcctgcagcctgaagatgttgcaacatattactgtcaacagtatgataatctccccagtgggacttttggccaggggaccaaactggagatcaaac

SEQ ID NO: 5427 - DNA, 325 bp, Artificial Sequence; identical to SEQ ID NO: 1154
  Description of Artificial Sequence: Synthetic polynucleotide

SEQ ID NO: 5428 - protein, 10 aa, Artificial Sequence
  Description of Artificial Sequence: Synthetic peptide
QQYDNLPSGT

SEQ ID NO: 5429 - DNA, 336 bp, Artificial Sequence
  Description of Artificial Sequence: Synthetic polynucleotide
  modified_base (327)..(327): a, c, t, g, unknown or other
  modified_base (330)..(330): a, c, t, g, unknown or other
agtctggggctgaggtgaagaagcctgggtcctcggtgagggtctcctgcaagaagacctctggaggcaccttcagccactatcctatcagctgggtgcgacaggcccctggacaagggcttgagtggatgggagggatcatccctgtctttggtacagtaaactacgctcagaagttccagggcagagccacgataaccgcggacgaatcttcgagcacagcctacttggaattgagcagcctgagatctgaggacactgccgtttattactgtgcgacgggattcagttatggtgactactggggccagggaaccctggtcaccnccncctcag

SEQ ID NO: 5430 - DNA, 352 bp, Artificial Sequence; identical to SEQ ID NO: 1199
  Description of Artificial Sequence: Synthetic polynucleotide
  modified_base (343)..(343): a, c, t, g, unknown or other
  modified_base (346)..(346): a, c, t, g, unknown or other

SEQ ID NO: 5431 - protein, 9 aa, Artificial Sequence
  Description of Artificial Sequence: Synthetic peptide
ATGFSYGDY

SEQ ID NO: 5432 - DNA, 297 bp, Artificial Sequence
  Description of Artificial Sequence: Synthetic polynucleotide
ccctgtctgcatctattggagacagagtcaccatcagttgccaggcgagtcaggacattaagaagaatttaaattggtatcaacagaaaccagggaaagcccctaagctcctgatctacgatgcatccaatttggaaacaggggtcccatcgaggttcattggaagtggatctgggacagattttactttcaccatcaacagcctgcagcctgaagatattgcaacatattactgtcaacagtatgataatctccccagtggctcttttggccaggggaccaggctggagatcaaac

SEQ ID NO: 5433 - DNA, 325 bp, Artificial Sequence; identical to SEQ ID NO: 1202
  Description of Artificial Sequence: Synthetic polynucleotide

SEQ ID NO: 5434 - protein, 10 aa, Artificial Sequence
  Description of Artificial Sequence: Synthetic peptide
QQYDNLPSGS

SEQ ID NO: 5435 - DNA, 352 bp, Artificial Sequence
  Description of Artificial Sequence: Synthetic polynucleotide
gtgcagctggtgcagtctggggctgaggtgaagaagcctgggtcctcggtgaaggtctcctgcaaggcttctggaggcaccttcagcaactatcctatcaactgggtgcgccaggcccctggacaagggcttgagtggatgggaggaatcatccccttctttggaaccccaaactacgcacagaagttccagggcagagtcacgattaccgcggacgaatccacgagcacagcctacatggagctgagcagcctgacatctgatgacacggccgtttattactgtacgagaggccacgggtccacggggggtgactactggggccagggagccctggtcattgtctcctcag

SEQ ID NO: 5436 - DNA, 355 bp, Artificial Sequence; identical to SEQ ID NO: 2393
  Description of Artificial Sequence: Synthetic polynucleotide

SEQ ID NO: 5437 - protein, 11 aa, Artificial Sequence
  Description of Artificial Sequence: Synthetic peptide
TRGHGSTGGDY

SEQ ID NO: 5438 - DNA, 293 bp, Artificial Sequence
  Description of Artificial Sequence: Synthetic polynucleotide
cctgtctgcgtctgtaggagacagagtcaccatcacttgccgggcgagtcaagacattagcaactatttaaattggtatcagcataaaccaggagaggcccctaaactcctgatctacgatgcatccaatttggaaacaggggtcccatcaaggttcagtggaagtggatctgggacagattttactttcaccatcaacagcctgcagcctgaagatattgcaacatatttctgtcaacaatataatactctccggtacacttttggccaggggaccaagctggagatcaaac

SEQ ID NO: 5439 - DNA, 322 bp, Artificial Sequence; identical to SEQ ID NO: 2396
  Description of Artificial Sequence: Synthetic polynucleotide

SEQ ID NO: 5440 - protein, 9 aa, Artificial Sequence
  Description of Artificial Sequence: Synthetic peptide
QQYNTLRYT

SEQ ID NO: 5441 - DNA, 348 bp, Artificial Sequence
  Description of Artificial Sequence: Synthetic polynucleotide
tgcagctggtgcagtctggggctgaggtgaagaagcctgggtcctcggtgaaggtctcctgcaaggcttctggaggcagcctcagcaactatgccatcacctgggtgcgacaggcccctggacaagggcttgagtggatgggaggggtcatccctgtctttgggacaccaagatacgcgcagaggttccagggcagggtcacgattaccgcggacgaaaccacaaatacagcctacatggaactgaggaggctgacatatgaggacacggccgtctacttctgtgcgagaggtggatatagcgtctccgactactggggccagggaaccctggtcaccgtctcctcag

SEQ ID NO: 5442 - DNA, 352 bp, Artificial Sequence; identical to SEQ ID NO: 3419
  Description of Artificial Sequence: Synthetic polynucleotide

SEQ ID NO: 5443 - protein, 10 aa, Artificial Sequence
  Description of Artificial Sequence: Synthetic peptide
ARGGYSVSDY

SEQ ID NO: 5444 - DNA, 293 bp, Artificial Sequence
  Description of Artificial Sequence: Synthetic polynucleotide
cctgtctgcatctgtaggagacagcgtcaccatcacttgccaggcgagtcaggacattggcaagtatttaaattggtatcagcagaaaccagggaaagcccctaagctcctgatctacgatgcatccaatttggaaacagggatcccatcaaggttcagtggaagtggatctgggacacattttactttctccatcagcagcctgcagcctgaagatattgcaacatattactgtcaacaatttgataatctccgctacacttttggccaggggaccaagttgcagatcaaac

SEQ ID NO: 5445 - DNA, 322 bp, Artificial Sequence; identical to SEQ ID NO: 3422
  Description of Artificial Sequence: Synthetic polynucleotide

SEQ ID NO: 5446 - protein, 9 aa, Artificial Sequence
  Description of Artificial Sequence: Synthetic peptide
QQFDNLRYT

SEQ ID NO: 5447 - DNA, 349 bp, Artificial Sequence
  Description of Artificial Sequence: Synthetic polynucleotide
gtgcagctggtgcagtctggggctgaggtgaagaagcctgggtcctcggtgaaggtctcctgcaaggcttctggaggcaccttcagtaacaatgctatcaactgggtgcgacaggcccctggacaagggcttgagtggatgggagggatcatccctgtctttggtacagcaaactacgcacagaagtttcagggcagagtcaccattaccgcggacgagtccacgaccacatcctacatgacgctgagcagcctgagatctgacgacacggccgtgttttattgtgcttcgggcggctataacccctttaactactggggccagggaacgccggtcaccgtctcctcag

SEQ ID NO: 5448 - DNA, 352 bp, Artificial Sequence; identical to SEQ ID NO: 3437
  Description of Artificial Sequence: Synthetic polynucleotide

SEQ ID NO: 5449 - protein, 10 aa, Artificial Sequence
  Description of Artificial Sequence: Synthetic peptide
ASGGYNPFNY

SEQ ID NO: 5450 - DNA, 294 bp, Artificial Sequence
  Description of Artificial Sequence: Synthetic polynucleotide
ccctgtctgcatctgtaggagacagagtcaccatcacttgccaggcgagtcaggacattaggaattatttaaattggtatcagcagaaaccagggaaagcccctaaggtcctgatctatgatgcatccaatttggaaacaggggtcccatcaaggttcagtggaagtgcatctgggaccgattttactttcaccatcagcagcctgcagcctgaagatgctgcaacatattactgtcaacaatataataatcccccgaacacttttggccaggggaccaaggtggagatcaaac

SEQ ID NO: 5451 - DNA, 322 bp, Artificial Sequence; identical to SEQ ID NO: 3440
  Description of Artificial Sequence: Synthetic polynucleotide

SEQ ID NO: 5452 - protein, 9 aa, Artificial Sequence
  Description of Artificial Sequence: Synthetic peptide
QQYNNPPNT

SEQ ID NO: 5453 - DNA, 349 bp, Artificial Sequence
  Description of Artificial Sequence: Synthetic polynucleotide
gtgcagctggtgcagtctggggctgaggtgaagaagcctgggtcctcggtgagggtctcctgcaaggcttctggaggctccttcagcaactatgctatgaactgggtgcgacaggcccctggacaagggcttgagtggatgggacagatcatccctttctttaaaacaccaaactacgcacagaagtttcagggcagagtcacgattaccgcggacgaatccacgaccacagcctacatggaactgagcagtctaagatctgacgacacggccgtatattactgtgcttcgggcggctacaacccctttgcctactggggccagggaaccctggtcaccgtctcctcag

SEQ ID NO: 5454 - DNA, 352 bp, Artificial Sequence; identical to SEQ ID NO: 3467
  Description of Artificial Sequence: Synthetic polynucleotide

SEQ ID NO: 5455 - protein, 10 aa, Artificial Sequence
  Description of Artificial Sequence: Synthetic peptide
ASGGYNPFAY

SEQ ID NO: 5456 - DNA, 293 bp, Artificial Sequence
  Description of Artificial Sequence: Synthetic polynucleotide
cctgtctgcatctgtaggagacagagtcaccatcacttgccaggcgagtcaggacattcgcaactatttaaattggtatcagcagaaaccagggaaagcccctaaggtcctgatctacgatgcatccaatttggaaacaggggtcccatcaaggttcagtggaagtcgatctggggcagattttactttcaccatcagcaacctgcagcctgaagatattgcaacatattactgtcaacagtataatactctcccgaacacctttggccaggggaccaagctggagatcaaac

SEQ ID NO: 5457 - DNA, 322 bp, Artificial Sequence; identical to SEQ ID NO: 3470
  Description of Artificial Sequence: Synthetic polynucleotide

SEQ ID NO: 5458 - protein, 9 aa, Artificial Sequence
  Description of Artificial Sequence: Synthetic peptide
QQYNTLPNT

SEQ ID NO: 5459 - DNA, 352 bp, Artificial Sequence
  Description of Artificial Sequence: Synthetic polynucleotide
gtgcagctggtgcagtctggggccgaggttaagaagcctgggtcctcggtgacggtctcctgcaaggcttctggaggcaccttcagtcactatggtatcaactgggtgcgacaggcccctggacaagggcttgagtggatgggagggatcatccctatatttggaacaacaaactacgcacagaagttccagggcagagtcacaattaccgcggacgcattcacgagcacagccttcatggaactgagcggcctgacctctcacgacacggccgtttattactgtgccagagaaatgggttctactgggggggcctactggggccagggaaccctggtcaccgtctccgcag

SEQ ID NO: 5460 - DNA, 355 bp, Artificial Sequence; identical to SEQ ID NO: 3989
  Description of Artificial Sequence: Synthetic polynucleotide

SEQ ID NO: 5461 - protein, 11 aa, Artificial Sequence
  Description of Artificial Sequence: Synthetic peptide
AREMGSTGGAY

SEQ ID NO: 5462 - DNA, 294 bp, Artificial Sequence
  Description of Artificial Sequence: Synthetic polynucleotide
ccctgtctgcatctgtaggagacagagtcaccatcacttgccaggcgagtcaggacattagaaactatttaaattggtatcagcagaaaccagggaaagcccctaagctcctgatcttcgatgcatccaatttggaaacaggggtcccacgaaggttcagtggaagtggatctgggacagattttactttcaccatcagcaccctgcagcctgaagatattgcaacatattactgtcaacagtatggtaatctccagtacacttttggccaggggaccaagctggagatcaaac

SEQ ID NO: 5463 - DNA, 322 bp, Artificial Sequence; identical to SEQ ID NO: 3992
  Description of Artificial Sequence: Synthetic polynucleotide

SEQ ID NO: 5464 - protein, 9 aa, Artificial Sequence
  Description of Artificial Sequence: Synthetic peptide
QQYGNLQYT

SEQ ID NO: 5465 - DNA, 343 bp, Artificial Sequence
  Description of Artificial Sequence: Synthetic polynucleotide
cagctggtgcagtctggggctgaggtgaagaagcctgggtcctcggtgaaggtctcctgcaaggcttctggaggcagcttcagtaactatgctatcaactggatacgacaggcccctggacaggggcttgagtggatgggagggatcatccctctctttggtgcaccaaactacgcacagaagttccagggcagagtcgcaatttccgcggacaaatccacgagcacagcctacatggagctgagtagtctgagatccgaggacacggccgtgtattattgtgcgagagtcagttacacgtatgactattggggccagggaaccctggtcatcgtctcctcag

SEQ ID NO: 5466 - DNA, 349 bp, Artificial Sequence; identical to SEQ ID NO: 437
  Description of Artificial Sequence: Synthetic polynucleotide

SEQ ID NO: 5467 - protein, 9 aa, Artificial Sequence
  Description of Artificial Sequence: Synthetic peptide
ARVSYTYDY

SEQ ID NO: 5468 - DNA, 291 bp, Artificial Sequence
  Description of Artificial Sequence: Synthetic polynucleotide
cctgtctgcatctgtaggagacagagtcaccatcacttgccaggcgagtcaggacattagcaagtatttaaattggtatcagcagaaaccagggaaagtccctaagctcctgatctacgatgcatccaatttggagacaggggtcccatcaaggttcagtggaactggatctgggacagatttcactttcaccatcagcagcctgcagcctgaggatattgcaacatattactgtcaacagcatggtagtctctccgggactttcggcggagggaccaaggtggagatcaa

SEQ ID NO: 5469 - DNA, 320 bp, Artificial Sequence; identical to SEQ ID NO: 440
  Description of Artificial Sequence: Synthetic polynucleotide

SEQ ID NO: 5470 - protein, 9 aa, Artificial Sequence
  Description of Artificial Sequence: Synthetic peptide
QQHGSLSGT

SEQ ID NO: 5471 - DNA, 349 bp, Artificial Sequence
  Description of Artificial Sequence: Synthetic polynucleotide
gtgcagctggtgcagtctggggctgaggtgaagaagcctgggtcctcggtgaaggtctcctgcaaggcttctggaggcaccttcagcaactatcctatcaactgggtgcgacaggcccctggacaaggacttgagtggatgggagggatcatccctctctttggtacaccaaactacgcacagaaattccagggcagagtcacgattaccgcggacaaatccacgaacacagcctacatggaactgagcagcctgagatctgaggacacggccgtctatttctgtgcgagagatcaaccctatgccgtcgtggtctggggccagggaaccctggtcaccgtctcgtcag

SEQ ID NO: 5472 - DNA, 352 bp, Artificial Sequence; identical to SEQ ID NO: 1655
  Description of Artificial Sequence: Synthetic polynucleotide

SEQ ID NO: 5473 - protein, 10 aa, Artificial Sequence
  Description of Artificial Sequence: Synthetic peptide
ARDQPYAVVV

SEQ ID NO: 5474 - DNA, 293 bp, Artificial Sequence
  Description of Artificial Sequence: Synthetic polynucleotide
cctgtctgcctctgtaggagacagagtcaccatcacttgccaggcgagtcaggacattagcaactatttaaattggtatcagcagaaaccagggaaagcccctaagctcctgatctacgatgcatccaatttggaaacaggggtcccatcaaggttcagtggaagtggatctgggacagattttactttcaccatcagcagcctgcagcctgaagatattgcaacatactactgtcaacagtatgataacgtcgtcaggactttcggcggagggaccaaggtggagatcaaac

SEQ ID NO: 5475 - DNA, 322 bp, Artificial Sequence; identical to SEQ ID NO: 1658
  Description of Artificial Sequence: Synthetic polynucleotide

SEQ ID NO: 5476 - protein, 9 aa, Artificial Sequence
  Description of Artificial Sequence: Synthetic peptide
QQYDNVVRT

SEQ ID NO: 5477 - DNA, 271 bp, Artificial Sequence
  Description of Artificial Sequence: Synthetic polynucleotide
ttcagcaactatgctttcaactgggttcgccaggcccctggacaaggacttgagtggatgggagggatcatccctgtttttggtaaactaaactacgcacagaagttccaggacagagtcacgattatcgcggacaaatccacgagcacagtctccatggaactgaacaacctgagatctgacgacactgccttttattactgtgcgagagcgatggggtctaccgggggggactactggggccagggaaccctggtcaccgtctcctcag

SEQ ID NO: 5478 - DNA, 355 bp, Artificial Sequence; identical to SEQ ID NO: 3245
  Description of Artificial Sequence: Synthetic polynucleotide

SEQ ID NO: 5479 - protein, 11 aa, Artificial Sequence
  Description of Artificial Sequence: Synthetic peptide
ARAMGSTGGDY

SEQ ID NO: 5480 - DNA, 294 bp, Artificial Sequence
  Description of Artificial Sequence: Synthetic polynucleotide
tgtctgcatctgtaggagacagagtcaccatcacttgccaggcgagtcaggacattagcaactatttaaattggtatcagaagaaaccagggaaagcccctaagctcctgatctacgatgcatccaatttggaaacaggggtcccatcaaggttcagtggaagtggatctgggacagattttactttcaccatcagcagcctgcagcctgaagatattgcagcatattactgtcaacagtatgataatctccctcggttcactttcggcggagggaccaacgtggagatcaaac

SEQ ID NO: 5481 - DNA, 325 bp, Artificial Sequence; identical to SEQ ID NO: 3248
  Description of Artificial Sequence: Synthetic polynucleotide

SEQ ID NO: 5482 - protein, 10 aa, Artificial Sequence
  Description of Artificial Sequence: Synthetic peptide
QQYDNLPRFT

SEQ ID NO: 5483 - DNA, 340 bp, Artificial Sequence
  Description of Artificial Sequence: Synthetic polynucleotide
cagtctggggctgaggtgaagaagcctgggtcctcggtgaaggtctcctgcaaggcttctggaggcaccttcagcaactatgctatcaactgggtgcgacaggcccctggacaagggcttgagtggatgggagggatcatccctatctttcatacaacaaattacgcacagaagttccagggcagagtcacgattaccgcggacaaatccacgagcacagcctacatggagctgaacagcctgagatctgaggacacggccatgtattactgtgcgagagagtttggtagcacggggggggcctactggggccagggatccttggtcaccgtctcctcag

SEQ ID NO: 5484 - DNA, 355 bp, Artificial Sequence; identical to SEQ ID NO: 3299
  Description of Artificial Sequence: Synthetic polynucleotide

SEQ ID NO: 5485 - protein, 11 aa, Artificial Sequence
  Description of Artificial Sequence: Synthetic peptide
AREFGSTGGAY

SEQ ID NO: 5486 - DNA, 296 bp, Artificial Sequence
  Description of Artificial Sequence: Synthetic polynucleotide
cctgtctgcatctgtaggagacagagtcaccatcacttgccaggcgagtcaggacattagtaactatttaaattggtatcagcagaaaccagggaaagcccctaagctcctgatctacgatgcattcaatttggaaacaggggtcccatcaaggttcagtggaggtgggtctgggacagactttactttcaccatcagcagcctgcagcctgaagatattgcaacatattactgtcaacagtatgataatctccctcgatacactttcggcggagggaccaaggtggagatcaaac

SEQ ID NO: 5487 - DNA, 325 bp, Artificial Sequence; identical to SEQ ID NO: 3302
  Description of Artificial Sequence: Synthetic polynucleotide

SEQ ID NO: 5488 - protein, 10 aa, Artificial Sequence
  Description of Artificial Sequence: Synthetic peptide
QQYDNLPRYT

SEQ ID NO: 5489 - DNA, 346 bp, Artificial Sequence
  Description of Artificial Sequence: Synthetic polynucleotide
gtgcagctggtgcagtctggggctgaggtgaagaagcctgggtcctcggtgaaggtctcctgcaaggcttctggaggcaccttcagaaattttcctttcagttgggtgcgacaggcccctggacaaggacttgagtggatgggagggctcatacctacctttggtacaccaaactacgcacagaagttccaggacagagtcacgattagcgcggacatatccacgagcacagtctacatggagctgagcagcctgagatctgacgacacggccttttattactgtgcgactggatacagttatggtgactactggggccagggaaccctggtcaccgtctcctcag

SEQ ID NO: 5490 - DNA, 349 bp, Artificial Sequence; identical to SEQ ID NO: 2945
  Description of Artificial Sequence: Synthetic polynucleotide

SEQ ID NO: 5491 - protein, 9 aa, Artificial Sequence
  Description of Artificial Sequence: Synthetic peptide
ATGYSYGDY

SEQ ID NO: 5492 - DNA, 289 bp, Artificial Sequence
  Description of Artificial Sequence: Synthetic polynucleotide
gcatctgtaggagacagagtcaccatcacttgccaggcgagtcaggacattaacaaatacttaaattggtatcagcaaaaaccagggaaagcccctaagctcctgatctacgatgcatccaatttggaaacaggggtcccatcaaggttcagtggaagtggatctgggacagattttactttcaccatcagcagcctgcagcctgaagattttgcaacatattactgtcaacaatatgataatcttcgtcggctcactttcggcggagggaccaaggtggaggtcaaac

SEQ ID NO: 5493 - DNA, 325 bp, Artificial Sequence; identical to SEQ ID NO: 2948
  Description of Artificial Sequence: Synthetic polynucleotide

SEQ ID NO: 5494 - protein, 10 aa, Artificial Sequence
  Description of Artificial Sequence: Synthetic peptide
QQYDNLRRLT

SEQ ID NO: 5495 - DNA, 352 bp, Artificial Sequence
  Description of Artificial Sequence: Synthetic polynucleotide
gtgcagctggtgcagtctggggctgaggtgaagaagcctgggtcctcggtgaaggtctcctgcaagggttctggaggcaccttcagcaactatgttatcaactgggtgcgagaggcccctggacaagggcttgagtggatgggagggatcatccctatctttggtacaacaaactacgcacagaagttccggggcagagtcacgattaccgcggacaaatccacgagcacagcctacatggagttgagcaggctgagatctgaggacacggccgtgtattactgtgcgagagattttggtagtacggggggggcctactggggccagggaaccctggtcaccgtctcctcag

SEQ ID NO: 5496 - DNA, 355 bp, Artificial Sequence; identical to SEQ ID NO: 2981
  Description of Artificial Sequence: Synthetic polynucleotide

SEQ ID NO: 5497 - protein, 11 aa, Artificial Sequence
  Description of Artificial Sequence: Synthetic peptide
ARDFGSTGGAY

SEQ ID NO: 5498 - DNA, 296 bp, Artificial Sequence
  Description of Artificial Sequence: Synthetic polynucleotide
cctgtctgcatctgtaggagacagagtcaccatcacttgccaggcgagtcaggacattagcaactatttaaattggtatcagaagaaaccagggaaagcccctaagctcctgatctacgattcatccaatttggaaacaggggtcccatcaaggttcagtggaagtggatctgggacagattttactttcaccatcagcagtctgcagcctgaagatattgcaacatattactgtcaacagtatgataatctccctcgactcactttcggcggagggaccaaggtggagatcaaac

SEQ ID NO: 5499 - DNA, 325 bp, Artificial Sequence; identical to SEQ ID NO: 2984
  Description of Artificial Sequence: Synthetic polynucleotide

SEQ ID NO: 5500 - protein, 10 aa, Artificial Sequence
  Description of Artificial Sequence: Synthetic peptide
QQYDNLPRLT

SEQ ID NO: 5501 - DNA, 350 bp, Artificial Sequence
  Description of Artificial Sequence: Synthetic polynucleotide
gcagctggtgcagtctggagctgaggtgaagaagcctgggtcctcggtgaaagtctcctgcaaggcttctggaggcaccttcagcaactatgctttcaactgggttcgacaggcccctggacaaggacttgagtggatgggagggatcatccctgtttttggtaaactaaactacgcacagaagttccagggcagagtcacgattaccgcggacaaatccacgagcacagcctccatggaactgaacaacctgagatctgaggacacggccgtgtattactgtgcgagagcggtgggatctactgggggggactactggggccagggaaccctggtcaccgtctcctcag

SEQ ID NO: 5502 - DNA, 355 bp, Artificial Sequence; identical to SEQ ID NO: 2999
  Description of Artificial Sequence: Synthetic polynucleotide

SEQ ID NO: 5503 - protein, 11 aa, Artificial Sequence
  Description of Artificial Sequence: Synthetic peptide
ARAVGSTGGDY

SEQ ID NO: 5504 - DNA, 296 bp, Artificial Sequence
  Description of Artificial Sequence: Synthetic polynucleotide
cctgtctgcatctgtaggagacagagtcaccatcacttgccaggcgagtcaggacattagcaactttttaaattggtatcagaagaaaccagggaaagcccctaaggtcctgatctacgatgcatccaatttggaaacaggggtcccatcaaggttcagtggaagtggatctgggacagattttactttcaccatcagcagcctgcagcctgaagatattgcaacatattactgtcaacagtatgataatctccctcggttcactttcggcggagggaccaaggtggagatcaaac

SEQ ID NO: 5505 - DNA, 325 bp, Artificial Sequence; identical to SEQ ID NO: 3002
  Description of Artificial Sequence: Synthetic polynucleotide

SEQ ID NO: 5506 - protein, 10 aa, Artificial Sequence
  Description of Artificial Sequence: Synthetic peptide
QQYDNLPRFT

SEQ ID NO: 5507 - DNA, 349 bp, Artificial Sequence
  Description of Artificial Sequence: Synthetic polynucleotide
gtgcagctggtgcagtctggggctgaggtgaagaagcctgggtcctcggtgaaggtctcctgcaagacttctggaggcaccttcagcaactttgctatcaactgggtgcgacaggcccctggacaagggcttgagtggatgggagggatcatcccttcctttggtacaccaaactacgcacagaacttccagggcagagtcacgattaccgcggacaagtccacgagcacagcctacatggagctgaccagcctgcgatctgacgacacggccgtctatttctgtgcgaggcggggtggctggggatttgactactggggccagggaaccctggtcaccgtctcctcag

SEQ ID NO: 5508 - DNA, 352 bp, Artificial Sequence; identical to SEQ ID NO: 4139
  Description of Artificial Sequence: Synthetic polynucleotide

SEQ ID NO: 5509 - protein, 10 aa, Artificial Sequence
  Description of Artificial Sequence: Synthetic peptide
ARRGGWGFDY

SEQ ID NO: 5510 - DNA, 291 bp, Artificial Sequence
  Description of Artificial Sequence: Synthetic polynucleotide
cctgtctgtatctgtaggagacagagtcaccatcacttgccaggcgagtcaggacattagcaactatttaaattggtatcagcagaaaccagggaaagcccctaaactcctgatttacgatacatccaatttggaaacaggggtcccatcaaggttcagtggaagtggatctgggacagattttactttcaccatcagcagcctgcagcctgaagatattgcgacatattactgtcatcagtatgataatctccgtcacactttcggcggagggaccaaggtggagatcaa

SEQ ID NO: 5511 - DNA, 320 bp, Artificial Sequence; identical to SEQ ID NO: 4142
  Description of Artificial Sequence: Synthetic polynucleotide

SEQ ID NO: 5512 - protein, 9 aa, Artificial Sequence
  Description of Artificial Sequence: Synthetic peptide
HQYDNLRHT

SEQ ID NO: 5513 - DNA, 349 bp, Artificial Sequence
  Description of Artificial Sequence: Synthetic polynucleotide
cagctggtgcagtctggggctgaggtgaagaagcctgggtcctcggtgaaggtctcctgcaaggcctctgggggcaccatcagcaactatcctatcatctgggtgcgacaggcccctggacaagggcttgaatggatgggcgggatcatccctgtctttggtacaccaaactacgcacagaagttccaggacagagtcaccattaccgcggacaaatccacgagcacagcctacatggagctgagcagcctaacatctgatgacacggccgtatattactgtgcgagagggagtgcctatggtgactacaactattggggccagggaaccctggtcaccgtctcctcag

SEQ ID NO: 5514 - DNA, 355 bp, Artificial Sequence; identical to SEQ ID NO: 3707
  Description of Artificial Sequence: Synthetic polynucleotide

SEQ ID NO: 5515 - protein, 11 aa, Artificial Sequence
  Description of Artificial Sequence: Synthetic peptide
ARGSAYGDYNY

SEQ ID NO: 5516 - DNA, 296 bp, Artificial Sequence
  Description of Artificial Sequence: Synthetic polynucleotide
cctgtctgcatctgtaggagacagagtcaccatcacttgccaggcgagtcaagacatttccaactatttaaattggttgcagcaaaaaccagggaaagcccctaaactcctgatctacgatgcatccaatttggaaacaggggtctcatcaaggttcagtggaagtggatctgggacagattttactttcaccatcagcagccttcagcctgaagatattgcaacatattactgtcaacgttatgataatctcccctcgctcactttcggcggagggaccaaggtggagatcaaac

SEQ ID NO: 5517 - DNA, 325 bp, Artificial Sequence; identical to SEQ ID NO: 3710
  Description of Artificial Sequence: Synthetic polynucleotide

SEQ ID NO: 5518 - protein, 10 aa, Artificial Sequence
  Description of Artificial Sequence: Synthetic peptide
QRYDNLPSLT

SEQ ID NO: 5519 - DNA, 349 bp, Artificial Sequence
  Description of Artificial Sequence: Synthetic polynucleotide
gtgcagctggtgcagtctggggctgaggtgaagaagcctgggtcctcggtgaaggtctcctgcaagacttctggaggcaccttcggcacctatactatcgcctgggtgcgacaggcccctggacaaggacttgagtggatgggagggctcatccctgtctttggaacaccaaactacgcacggaagttccagggcagactcactattaccgcggacagatccacgagcacagcctacatggagttgagcagcctgggatctgaggacacggccgtttattattgtgcgaggcggggtggctggggattggactactggggccagggcaccctggtcatcgtctcttcag

SEQ ID NO: 5520 - DNA, 352 bp, Artificial Sequence; identical to SEQ ID NO: 3971
  Description of Artificial Sequence: Synthetic polynucleotide

SEQ ID NO: 5521 - protein, 10 aa, Artificial Sequence
  Description of Artificial Sequence: Synthetic peptide
ARRGGWGLDY

SEQ ID NO: 5522 - DNA, 293 bp, Artificial Sequence
  Description of Artificial Sequence: Synthetic polynucleotide
cctgtctgcagctgtaggagacagagtcaccatcacttgccaggcgagtcaggacattagcaactatgtaaattggtatcagcaaaaaccagggaaagcccctaagatcctgatctacgatgcatccaatttggaaacaggggtcccatcaagattcagtggaagtggatctgggacatattttactttcaccatcagcagcctgcagcctgaagatattgcaacatattactgtcaacagtatgataatctccgtctcactttcggcggagggaccaaggtggaggtcaaac

SEQ ID NO: 5523 - DNA, 322 bp, Artificial Sequence; identical to SEQ ID NO: 3974
  Description of Artificial Sequence: Synthetic polynucleotide

SEQ ID NO: 5524 - protein, 9 aa, Artificial Sequence
  Description of Artificial Sequence: Synthetic peptide
QQYDNLRLT

SEQ ID NO: 5525 - DNA, 352 bp, Artificial Sequence
  Description of Artificial Sequence: Synthetic polynucleotide
gtgcagctggtgcagtctggggctgaggtgagaaagcctgggtcctcggtgaaggtctcctgcaaggtttctggaggctccttcgacaactttgctatcatctgggtgcgacaggcccctggacaaggacttgagtggatgggagggatcatccctttctttggtacaccaaactacgcacagagattccagggcagagtcacgattaccgcggacaaatccaagagcacagtctacatggagctgagcagcctgagatctgagaacacggccgtatattactgtgcgagagcatctggttcggggagttatgactattggggccagggaaccctggtcaccgtctcctcag

SEQ ID NO: 5526 - DNA, 355 bp, Artificial Sequence; identical to SEQ ID NO: 1361
  Description of Artificial Sequence: Synthetic polynucleotide

SEQ ID NO: 5527 - protein, 11 aa, Artificial Sequence
  Description of Artificial Sequence: Synthetic peptide
ARASGSGSYDY

SEQ ID NO: 5528 - DNA, 308 bp, Artificial Sequence
  Description of Artificial Sequence: Synthetic polynucleotide
cctgtccgtcacccctggagagtcggcctccatctcctgcaggtctagtcagagcctcctgcatcgtgatggaaacaattatttggattggtacctgcagaagccagggcagtctccacagctcctgatctatatgggttctaatcgggcctccggggtccctgacaggttcagtggcagtggatcaggcacagattttacactgaaaatcagcagagtggaggctgaggatgttggggtttattactgcatgcaagttgtacaaactcctgggacttttggccaggggaccaagctggagatcaaac

SEQ ID NO: 5529 - DNA, 337 bp, Artificial Sequence; identical to SEQ ID NO: 1364
  Description of Artificial Sequence: Synthetic polynucleotide

SEQ ID NO: 5530 - protein, 9 aa, Artificial Sequence
  Description of Artificial Sequence: Synthetic peptide
MQVVQTPGT

SEQ ID NO: 5531 - DNA, 343 bp, Artificial Sequence
  Description of Artificial Sequence: Synthetic polynucleotide
gtgcagtctggggctgaggtgaagaggcctgggtcctcggtgaaggtctcctgcaaggcttctggaggcaccttcaacacctatgccttcagctgggtgcgacaggcccctggacaagggcttcaatacatgggagggatcatccctgtctttggaacaccaaactacgcacagaagttccagggcagagtcactattaccgcggacaagtccacgagcacagcctacatggagctaaacagcctgagatctgacgacacggccgtctattactgtgcgagagatgggggtactgggagctttgactactggggccagggaaccctggtcaccgtctcctcag

SEQ ID NO: 5532 - DNA, 355 bp, Artificial Sequence; identical to SEQ ID NO: 2795
  Description of Artificial Sequence: Synthetic polynucleotide

SEQ ID NO: 5533 - protein, 11 aa, Artificial Sequence
  Description of Artificial Sequence: Synthetic peptide
ARDGGTGSFDY

SEQ ID NO: 5534 - DNA, 303 bp, Artificial Sequence
  Description of Artificial Sequence: Synthetic polynucleotide
tgtccgtcacccctggagagccggcctccatctcctgcaggtctagtcagagcctcctgcatagggatggacacaactatttggattggtatgtgcagaagccagggcagtctccacaactcctgatctattggggttctaatcgggcctccggggtccctgccaggttcagtggcagtggatcaggcacagattttacactgaaaatcagcagagtggaggctgaggatattggggtttattattgcatgcaagctctacagagtcagacgtttggccaggggaccaagctggagatcaaac

SEQ ID NO: 5535 - DNA, 334 bp, Artificial Sequence; identical to SEQ ID NO: 2798
  Description of Artificial Sequence: Synthetic polynucleotide

SEQ ID NO: 5536 - protein, 8 aa, Artificial Sequence
  Description of Artificial Sequence: Synthetic peptide
MQALQSQT

SEQ ID NO: 5537 - DNA, 351 bp, Artificial Sequence
  Description of Artificial Sequence: Synthetic polynucleotide
tgcagctggtgcagtctggggctgaggtgaagaagcctgggtcctcggtgaaggtctcctgcaaggcttctggaggcaccttcagcaactatgctatcagctgggtgcgacaggcccctggacaagggcttgagtggatgggagggatcatccctatctttggtacagcaaactacgcacagaagttccagggcagagtcacgattaccgcggacaaatccacgagcacagcctacatggagctgagcagcctgagatctgaagacacggccgtgtattactgttcgagagattcgggggacaaccctttggactactggggccagggaaccctggtcaccgtctcctcag

SEQ ID NO: 5538 - DNA, 355 bp, Artificial Sequence; identical to SEQ ID NO: 2657
  Description of Artificial Sequence: Synthetic polynucleotide

SEQ ID NO: 5539 - protein, 11 aa, Artificial Sequence
  Description of Artificial Sequence: Synthetic peptide
SRDSGDNPLDY

SEQ ID NO: 5540 - DNA, 306 bp, Artificial Sequence
  Description of Artificial Sequence: Synthetic polynucleotide
tgcccgtcacccctggagagtcggcctccatctcctgcaggtctagtcagagcctcctgcatagtaatggatacaactatttggattggtacgtgcagaagccagggcagtctccacagctcctgatctatttggcttctaatcgggcctccggggtccctgacaggttcagtggcagtggatcaggcacagattttacactgaaaatcagcagagtggaggctgaggatgttggggtttattactgcatgcaagctctacaaactccgtacacttttggccaggggaccaagctggagatcaaac

SEQ ID NO: 5541 - DNA, 337 bp, Artificial Sequence; identical to SEQ ID NO: 2660
  Description of Artificial Sequence: Synthetic polynucleotide

SEQ ID NO: 5542 - protein, 9 aa, Artificial Sequence
  Description of Artificial Sequence: Synthetic peptide
MQALQTPYT

SEQ ID NO: 5543 - DNA, 345 bp, Artificial Sequence
  Description of Artificial Sequence: Synthetic polynucleotide
gcagctggtgcagtctggggctgaggtgaagaagcctgggtcctcggtgaaggtctcctgcaaggcttctggattcaccttcaacaactttgcaatcgcctgggtgcgacaggcccctggacaagggcttgagtggatgggagggatcatccccatttttggtacaccaaactacgcacagaagttccagggcagagtgaagattagcgcggacaagttcacgagcacagcctatatggaggtgatcagcctgagatctgacgacacggccgtgtatttctgtgcgagagaagacgggcttgggagttacggggactggggccagggaaccctcgtcaccgtctc

SEQ ID NO: 5544 - DNA, 350 bp, Artificial Sequence; identical to SEQ ID NO: 2699
  Description of Artificial Sequence: Synthetic polynucleotide

SEQ ID NO: 5545 - protein, 11 aa, Artificial Sequence
  Description of Artificial Sequence: Synthetic peptide
AREDGLGSYGD

SEQ ID NO: 5546 - DNA, 306 bp, Artificial Sequence
  Description of Artificial Sequence: Synthetic polynucleotide
tgcccgtcacccctggagagccggcctccatctcctgcaggtctagtcagagcctcctgcatagtaatggatacaactatgtggattggtacctgcagaagccagggcagtctccacagctcctgatctatttgggctctaatcgggcctccggggtccctgacaggttcagtggcagtggatcaggcgcagattttacactgaaaatcagcagagtggaggctgaggatgttggggtttattactgcatgcaggctctacaaactcctaagacttttggccaggggaccaagctggatatcaaac

SEQ ID NO: 5547 - DNA, 337 bp, Artificial Sequence; identical to SEQ ID NO: 2702
  Description of Artificial Sequence: Synthetic polynucleotide

SEQ ID NO: 5548 - protein, 9 aa, Artificial Sequence
  Description of Artificial Sequence: Synthetic peptide
MQALQTPKT

SEQ ID NO: 5549 - DNA, 352 bp, Artificial Sequence
  Description of Artificial Sequence: Synthetic polynucleotide
gtgcagctggtgcagtctggggctgaggtgaagaagcctgggtcctcggtgacggtctcctgcaaggtttctggaggcaccttcagcacttatgctatcacatgggtgcgacaggcccctggacaagggcttgagtggatgggagggatcatccctgtctttggtacagcagactacgcacagaagtttcagggcagcgtcacgattaccgcggacatatccacgagcacagcctacatggagctgagtagtctgacatctgaggacacggccgtgtattactgtgcgaggccgtcggggagtgggagcttcgactactggggccagggaaccctggtcaccgtctcctcag

SEQ ID NO: 5550 - DNA, 355 bp, Artificial Sequence; identical to SEQ ID NO: 2951
  Description of Artificial Sequence: Synthetic polynucleotide

SEQ ID NO: 5551 - protein, 11 aa, Artificial Sequence
  Description of Artificial Sequence: Synthetic peptide
ARPSGSGSFDY

SEQ ID NO: 5552 - DNA, 308 bp, Artificial Sequence
  Description of Artificial Sequence: Synthetic polynucleotide
cctgcccgtcacccctggagagccggcctccatctcctgcaggtctagtcagagcctcctgcatagtaatggagacaactatttggattggtacctgcagaagccagggcagtctccacagctcctgatctatttgggttcttatcgggcctccggggtccctgacaggttcagtggtagtggatcagacacagactttacactgaaaatcagcagagtggaggctggggatgttggggtttattactgcatgcaagctctacgaactcctcatacttttggccaggggaccaagctggagatcaaac

SEQ ID NO: 5553 - DNA, 337 bp, Artificial Sequence; identical to SEQ ID NO: 2954
  Description of Artificial Sequence: Synthetic polynucleotide

SEQ ID NO: 5554 - protein, 9 aa, Artificial Sequence
  Description of Artificial Sequence: Synthetic peptide
MQALRTPHT

SEQ ID NO: 5555 - DNA, 352 bp, Artificial Sequence
  Description of Artificial Sequence: Synthetic polynucleotide
gtgcagctggtgcagtctggggctgaggtgaggaagcctgggtcctcggtgaaggtctcctgcaaggcttctggaggcaccttcagcaactatgctatcaactgggtgcgacaggcccctggacaagggctggagtggatgggacagctcatccctgtctttggtagtccaaactacgcacagaacttccagggcagagtcacgattaccgcggacagatccacgcgcacagcctacatagaactgaccagcctgagatctgacgacacggccgtttattattgtgcgagagatgatggtttggggagttatggatattggggccagggaaccctggtcaccgtctcctcag

SEQ ID NO: 5556 - DNA, 355 bp, Artificial Sequence; identical to SEQ ID NO: 3881
  Description of Artificial Sequence: Synthetic polynucleotide

SEQ ID NO: 5557 - protein, 11 aa, Artificial Sequence
  Description of Artificial Sequence: Synthetic peptide
ARDDGLGSYGY

SEQ ID NO: 5558 - DNA, 308 bp, Artificial Sequence
  Description of Artificial Sequence: Synthetic polynucleotide
cctgcccgtcacccctggagagccggcctccatctcctgcaggtccagtcagagcctcctgcatagaagtggatacaattatttgggttggtacctgcagaagccagggcagtctccacagctcctgatctatttgggttctaatcgggcctccggggtccctgacagattcagtggcagtggatcaggcacagattttacactgagcatcagcagagtggaggctgaggatgttggggtttattactgcatgcaaactctccaaactcctcacacttttggccaggggaccaagctggagatcaaac

SEQ ID NO: 5559 - DNA, 337 bp, Artificial Sequence; identical to SEQ ID NO: 3884
  Description of Artificial Sequence: Synthetic polynucleotide

SEQ ID NO: 5560 - protein, 9 aa, Artificial Sequence
  Description of Artificial Sequence: Synthetic peptide
MQTLQTPHT

SEQ ID NO: 5561 - DNA, 350 bp, Artificial Sequence
  Description of Artificial Sequence: Synthetic polynucleotide
gtgcagctggtgcagtctggggctgaggtgaagaagcctgggtcctcggtgaaggtctcctgcaagacttctggaggcaccttcagcaactatgctattaactgggtgcgacaggcccccggacaggggcttgagtggatgggagggatcatccctatctttggtacaccaaactacgcacagaagttccaggccagagtcacagtaaccgcggacagatccacgagcacagcctacatggagctgaccagcctgacttctgacgacacggccgtctattactgtgcgagagacggtggtttggggagttttgactactggggccagggaacccaggtcaccgtctcctc

SEQ ID NO: 5562 - DNA, 353 bp, Artificial Sequence; identical to SEQ ID NO: 3959
  Description of Artificial Sequence: Synthetic polynucleotide

SEQ ID NO: 5563 - protein, 11 aa, Artificial Sequence
  Description of Artificial Sequence: Synthetic peptide
ARDGGLGSFDY

SEQ ID NO: 5564 - DNA, 328 bp, Artificial Sequence
  Description of Artificial Sequence: Synthetic polynucleotide
  modified_base (13)..(13): a, c, t, g, unknown or other
  modified_base (16)..(16): a, c, t, g, unknown or other
atgactcagtctncantctccctgcccgtcactcctggagagccggcctccatctcctgcaggtctagtcagagcctcctgcatagagatggaaacaactatttggattggtacctgcagaagccggggcagtctccacagctcctgatctattggggttctaatcgggcctccggggtccctgacaggttcagtggcagtggatcaggcacagattttatactgaagatcagcagagtggaggctgaggatgttgggctttattactgcatgcaacctctacaaactccgtacacttttggccaggggaccaagctggagatcaaac

SEQ ID NO: 5565 - DNA, 337 bp, Artificial Sequence; identical to SEQ ID NO: 3962
  Description of Artificial Sequence: Synthetic polynucleotide
  modified_base (22)..(22): a, c, t, g, unknown or other
  modified_base (25)..(25): a, c, t, g, unknown or other

SEQ ID NO: 5566 - protein, 9 aa, Artificial Sequence
  Description of Artificial Sequence: Synthetic peptide
MQPLQTPYT

SEQ ID NO: 5567 - DNA, 356 bp, Artificial Sequence
  Description of Artificial Sequence: Synthetic polynucleotide
gtgcagctggtgcagtctggggctgaggtgaagaggcctgggtcctcggtgaaggtctcctgcaaagtttctggaggcaacttcaacaactttgctctcagctgggtgcgacaggcccctggacaagggcttgagtggatgggagagatcatccctgtttttggtacaccaaactccgcacagaagttccagggcagagtcacgattaccgcggacaaatccacgagcacagcctacctggaactgagaagcctgagatatgaggacacggccgtgtattactgtgcgagagataggggtggttcgggcccagggtttgactactggggccagggaaccctggtcaccgtctcctc

SEQ ID NO: 5568 - DNA, 359 bp, Artificial Sequence; identical to SEQ ID NO: 4007
  Description of Artificial Sequence: Synthetic polynucleotide

SEQ ID NO: 5569 - protein, 13 aa, Artificial Sequence
  Description of Artificial Sequence: Synthetic peptide
ARDRGGSGPGFDY

SEQ ID NO: 5570 - DNA, 328 bp, Artificial Sequence
  Description of Artificial Sequence: Synthetic polynucleotide
  modified_base (16)..(16): a, c, t, g, unknown or other
atgactcagtctccantctccctgcccgtcacccctggagagccggcctccatctcctgcaggtctagtcagagcctcctgcatagtaatggatacaactatttggattggtacctgcagaagccagggcagtccccacagctcctgatctatttggggtctaatcgggcctccggggtccctgacaggttcagtggcagtggatcaggcacagattttacactgaaaatcagcagagtggaggctgaggatgttggggtttattactgcatgcaagctctacaaactcctcggacttttggccaggggaccaagctggagatcaaac

SEQ ID NO: 5571 - DNA, 337 bp, Artificial Sequence; identical to SEQ ID NO: 4010
  Description of Artificial Sequence: Synthetic polynucleotide
  modified_base (25)..(25): a, c, t, g, unknown or other

SEQ ID NO: 5572 - protein, 9 aa, Artificial Sequence
  Description of Artificial Sequence: Synthetic peptide
MQALQTPRT

SEQ ID NO: 5573 - DNA, 352 bp, Artificial Sequence
  Description of Artificial Sequence: Synthetic polynucleotide
gtgcagctggtgcagtctggggctgaggtgaagaagcctgggtcctcggtgaaggtctcctgcaaggcttctggaggcaccttcaacaactttcctctcaactgggtgcgacaggcccctggacaagggcttgagtggatgggagggatcatccctatatttggtacagcaaacttcgcacagaagttccagggcagagtcacgattaccgcggacaaatccacgagcacagcctacatggaactgagcagcctgagatctgaggacacggccgtgtattactgtgcgagagtggatggtttggggagttatgactcctggggccagggaaccctggtcaccgtctcctcag

SEQ ID NO: 5574 - DNA, 355 bp, Artificial Sequence; identical to SEQ ID NO: 4085
  Description of Artificial Sequence: Synthetic polynucleotide

SEQ ID NO: 5575 - protein, 11 aa, Artificial Sequence
  Description of Artificial Sequence: Synthetic peptide
ARVDGLGSYDS

SEQ ID NO: 5576 - DNA, 309 bp, Artificial Sequence
  Description of Artificial Sequence: Synthetic polynucleotide
cctgccccgtcacccctggagagccggcctccatctcctgcaggtctagtcagagcctcctgcataggagtggatacaactatttggattggtacctgcagaagccagggcagcctccacagctcctgatctatttgggatctaatcgggcctccggggtccctgacaggttcagtggcagtggatcaggcacagattttacactgaaaatcagcagagtggaggctgaggatgttggggtttattactgcatgcaagctctgcaaactccccacacttttggccaggggaccaagctggagatcaaac

SEQ ID NO: 5577 - DNA, 337 bp, Artificial Sequence; identical to SEQ ID NO: 4088
  Description of Artificial Sequence: Synthetic polynucleotide

SEQ ID NO: 5578 - protein, 9 aa, Artificial Sequence
  Description of Artificial Sequence: Synthetic peptide
MQALQTPHT

SEQ ID NO: 5579 - DNA, 352 bp, Artificial Sequence
  Description of Artificial Sequence: Synthetic polynucleotide
gtgcagctggtgcagtctggggctgaggtgaagaagcctgggtcctcggtgagggtctcctgcaaggcttctggaggcaccttcagcaactatgaaatcgcctgggttcggcaggcccctggacaagggctagagtggatgggacggatcatccctgtctttgggacaccaagctacgcacagaagttccagggcagagtcacgattagtgcggacatttctacgagcacggcctacatggagctgagcagcctgagatctgaggacacggccgtgtatttctgtgcgagagatggaggtttggggagttatgactactggggccagggaaccctggtcaccgtctcctcag

SEQ ID NO: 5580 - DNA, 355 bp, Artificial Sequence; identical to SEQ ID NO: 3641
  Description of Artificial Sequence: Synthetic polynucleotide

SEQ ID NO: 5581 - protein, 11 aa, Artificial Sequence
  Description of Artificial Sequence: Synthetic peptide
ARDGGLGSYDY

SEQ ID NO: 5582 - DNA, 307 bp, Artificial Sequence
  Description of Artificial Sequence: Synthetic polynucleotide
ctgcccgtcacccctggagagccggcctccatctcctgcaggtctagtcagagcctcctgcatagaaatggagacaactatttggattggtacctgcagaagccagggcagtctccacaactcctgatctatatgggttcttatcgggcctccggggtccctgacaggttcagtggcagtggatcaggcacagattttacactgaaaatcagtagagtggaggctgaggatgttggggtttattactgcatgcaagctctacaaagtcctcgctcttttggccaggggaccaagctggagatcaaac

SEQ ID NO: 5583 - DNA, 337 bp, Artificial Sequence; identical to SEQ ID NO: 3644
  Description of Artificial Sequence: Synthetic polynucleotide

SEQ ID NO: 5584 - protein, 9 aa, Artificial Sequence
  Description of Artificial Sequence: Synthetic peptide
MQALQSPRS

SEQ ID NO: 5585 - DNA, 352 bp, Artificial Sequence
  Description of Artificial Sequence: Synthetic polynucleotide
gtgcagctggtgcagtctgggactgaggtgaagaagcctgggtcctcggtgagggtctcctgtaagacttctggatatacattcagcaactttgcaatcgcctgggtgcgacaggcccctggacaaggacttgagtggatgggaggtctcatacctttctttcgtaaaccaaactacgcacagaagttccagggcagggtcacaattaccgcggacgaatccacgaggacagcctacatggacctgagtagactgacagccgatgacacggccgcctattactgtgcgagagaggggggtcttgggagctacgacttctggggccagggaaccctggtcaccgtctcctcag

SEQ ID NO: 5586 - DNA, 355 bp, Artificial Sequence; identical to SEQ ID NO: 365
  Description of Artificial Sequence: Synthetic polynucleotide

SEQ ID NO: 5587 - protein, 11 aa, Artificial Sequence
  Description of Artificial Sequence: Synthetic peptide
AREGGLGSYDF

SEQ ID NO: 5588 - DNA, 308 bp, Artificial Sequence
  Description of Artificial Sequence: Synthetic polynucleotide
cctgtccgtcacccctggagagccggcctccatctcctgcgggtctagtcagagcctcctgcatagagatggaaacaactatttggattggtatctgcagaagccagggcagtctccacagctcctgatctatttgggttctaatcgggcctccggggtccctgacaggttcagtggcagtggatcaggcacagatttcacactgaaaatcagcagagtggaggctgaggatgttggagtctattactgcatgcaagctctacgaactcctcggattttcggcggagggaccaaggtggagctcaaac

SEQ ID NO: 5589 - DNA, 337 bp, Artificial Sequence; identical to SEQ ID NO: 368
  Description of Artificial Sequence: Synthetic polynucleotide

SEQ ID NO: 5590 - protein, 9 aa, Artificial Sequence
  Description of Artificial Sequence: Synthetic peptide
MQALRTPRI

SEQ ID NO: 5591 - DNA, 352 bp, Artificial Sequence
  Description of Artificial Sequence: Synthetic polynucleotide
gtgcagctggtgcagtctgggactgaggtgaagaagcctgggtcttcggtgaaggtctcctgcaagtcttctggaggcaccttcagcaactttgctatcaattgggtgcgacaggcccccggacaggggcttgagtggatgggagagatcatccctatctttggcacaccaaactacgcccagaagttccagggcaaagtcaccattaccgcggacgagtccacgcgcacatcttacatggagctgagcaacctgagatctgaggacacggccttgtattactgtgcgaggaccgatggctacggcagtttggacgactggggccagggaaccctggtcaccgtctcctcag

SEQ ID NO: 5592 - DNA, 355 bp, Artificial Sequence; identical to SEQ ID NO: 2063
  Description of Artificial Sequence: Synthetic polynucleotide

SEQ ID NO: 5593 - protein, 11 aa, Artificial Sequence
  Description of Artificial Sequence: Synthetic peptide
ARTDGYGSLDD

SEQ ID NO: 5594 - DNA, 309 bp, Artificial Sequence
  Description of Artificial Sequence: Synthetic polynucleotide
cctgccccgtcacccctggagagtcggcctccatctcctgcaggtctagtcagagcctcctgcatagtaatgggtacaactatttggattggtacctgcagaagccagggcagtctccacagctcctgatctatttgggttctaatcgggcctccggggtccctgacaggttcagtggcagtggatcaggcacagattttacactgaagattagcagagtggaggctgaggatgttggggtttattactgcatgcaagctcgacaaactcctcgcactttcggcggagggaccaaggtggagatcaaac

SEQ ID NO: 5595 - DNA, 337 bp, Artificial Sequence; identical to SEQ ID NO: 2066
  Description of Artificial Sequence: Synthetic polynucleotide

SEQ ID NO: 5596 - protein, 9 aa, Artificial Sequence
  Description of Artificial Sequence: Synthetic peptide
MQARQTPRT

SEQ ID NO: 5597 - DNA, 350 bp, Artificial Sequence
  Description of Artificial Sequence: Synthetic polynucleotide
gcagctggtgcagtctggggctgaggtgaggaagcctgggtcctcggtgaaggtctcctgcaaggcttctggaggcaccttcagcaactttgctatcaactggatacgactggcccctggacaagggcttgagtggatgggaggcatcatccctatctttggtgcagcaaactacgcacagaaattccagggcagagtcacgattaccgcggacgaatccacgaagacagcccacatggagctgcgcagcctgacatcagaggacacggccgtattctactgtgcgagaactgggggctacgggtctcttgacgactggggccagggaaccctggtcaccgtctcctcag

SEQ ID NO: 5598 - DNA, 355 bp, Artificial Sequence; identical to SEQ ID NO: 2165
  Description of Artificial Sequence: Synthetic polynucleotide

SEQ ID NO: 5599 - protein, 11 aa, Artificial Sequence
  Description of Artificial Sequence: Synthetic peptide
ARTGGYGSLDD

SEQ ID NO: 5600 - DNA, 306 bp, Artificial Sequence
  Description of Artificial Sequence: Synthetic polynucleotide
tgccccgttaccctggagagccggcctccatctcctgcaggtctagtcagagcctcctgaatagaaatggatacaactatttggattggtacctgcagaagccagggcagtctccacagctcctgatctatttgggttctaatcgggcctccggggtccctgacaggttcagtggcagtggatcaggcacagattttacactgaaaatcagcagagtggaggctgaggatgttggggtttattactgcatgcaagctctacaaaccccgctgactttcggcggagggaccaaggtggagatcaaac

SEQ ID NO: 5601 - DNA, 337 bp, Artificial Sequence; identical to SEQ ID NO: 2168
  Description of Artificial Sequence: Synthetic polynucleotide

SEQ ID NO: 5602 - protein, 9 aa, Artificial Sequence
  Description of Artificial Sequence: Synthetic peptide
MQALQTPLT

SEQ ID NO: 5603 - DNA, 351 bp, Artificial Sequence
  Description of Artificial Sequence: Synthetic polynucleotide
tgcagctggtgcagtctggggctgaggtgaagaggcctgggtcctcggtgaaggtctcctgcaaggcttctggaggcaccttcaacaactttgctttcagctgggtgcgacaggcccctggacaagggctcgagtggatgggacagatcatccctatctttattacaccaaactacgcacagaagttccggggcagagtcacgattaccgcggacgtatcgacgagcacagtctacatggagctgagtggcctgagatctgacgacacggccgtctattactgtgcgagggacggtggctaccacccccttgactactggggccagggaaccctggtcaccgtctcctcag

SEQ ID NO: 5604 - DNA, 355 bp, Artificial Sequence; identical to SEQ ID NO: 2645
  Description of Artificial Sequence: Synthetic polynucleotide

SEQ ID NO: 5605 - protein, 11 aa, Artificial Sequence
  Description of Artificial Sequence: Synthetic peptide
ARDGGYHPLDY

SEQ ID NO: 5606 - DNA, 306 bp, Artificial Sequence
  Description of Artificial Sequence: Synthetic polynucleotide
tgcccgtcacccctggagagccggcctccatctcctgcaggtctagtcagagtctccttcatagtactggatacaactatttggattggtacctgcagaagccaggccagcctccacagctcctgatctttttgggttctaatcgggcctccggggtccctgacaggttcagtggcagtggatcaggcacagattttacactgaaaatcagcagagtggaggctgaggatgttggggtttattactgcatgcaaggtctacgaactcctctcactttcggcggcgggaccaaggtggagatcaaac

SEQ ID NO: 5607 - DNA, 337 bp, Artificial Sequence; identical to SEQ ID NO: 2648
  Description of Artificial Sequence: Synthetic polynucleotide

SEQ ID NO: 5608 - protein, 9 aa, Artificial Sequence
  Description of Artificial Sequence: Synthetic peptide
MQGLRTPLT

SEQ ID NO: 5609 - DNA, 332 bp, Artificial Sequence
  Description of Artificial Sequence: Synthetic polynucleotide
ggggcagaggtgaagaagcctgggtcctcggtgaaggtctcctgcaaggcttctggagtcagcttcagcaactatgctatcaactgggtgcgacaggcccctggacaaggacttgagtggatgggagggatcatccctgtctttggttcagcaaactacgcacagaagttccagggcagagtcacgattaccgcggacgagcgcaggagcacagcctacatggaactgaggagcctgcgatctgaggacacggccatatattattgtgcgagagagagcggggttggtggtgatcttttctggggcccgggaagcctggtcaccgtctcctc

SEQ ID NO: 5610 - DNA, 353 bp, Artificial Sequence; identical to SEQ ID NO: 3353
  Description of Artificial Sequence: Synthetic polynucleotide

SEQ ID NO: 5611 - protein, 11 aa, Artificial Sequence
  Description of Artificial Sequence: Synthetic peptide
ARESGVGGDLF

SEQ ID NO: 5612 - DNA, 306 bp, Artificial Sequence
  Description of Artificial Sequence: Synthetic polynucleotide
  modified_base (10)..(10): a, c, t, g, unknown or other
tgcccgtcanccctggagaaccggcctccatctcctgcaggtctagtcagagcctcttggatagtaatggattcaactacttggattggtacctgcagaagccagggcagtctccacaggtcctgatctatttgggttctactcgggcttccggggtccctgacaggttcagtggcagtggatcaggcacagattttacactgaaaatcagcagagtggaggctgaggatgttggcgtttattactgcatgcaagctcgacaaacccctctcactttcggcggagggaccaaggtggagatcaaac

SEQ ID NO: 5613 - DNA, 337 bp, Artificial Sequence; identical to SEQ ID NO: 3356
  Description of Artificial Sequence: Synthetic polynucleotide
  modified_base (41)..(41): a, c, t, g, unknown or other

SEQ ID NO: 5614 - protein, 9 aa, Artificial Sequence
  Description of Artificial Sequence: Synthetic peptide
MQARQTPLT

SEQ ID NO: 5615 - DNA, 352 bp, Artificial Sequence
  Description of Artificial Sequence: Synthetic polynucleotide
gtgcagctggtgcagtctggggctgaggtgaagaagcctgggtcctcggtgaaggtctcctgcaaggcttttggagtccccttcagcaactatgctatccactgggtgcgacaggcccctggacaagggcttgagtggatggggaggatcatccctgtctttggtacaccaaactacgcacaccagttccagggcagagtctccattaccgcggacgcgtcgacgagcacagcctacatggaggtgggccgcctgagatctgaagacacggccgtctattattgtgcgagagagagcggggttggtggtgatcttttgtggggccagggaaccctggtcaccgtctcctcag

SEQ ID NO: 5616 - DNA, 355 bp, Artificial Sequence; identical to SEQ ID NO: 3395
  Description of Artificial Sequence: Synthetic polynucleotide

SEQ ID NO: 5617 - protein, 11 aa, Artificial Sequence
  Description of Artificial Sequence: Synthetic peptide
ARESGVGGDLL

SEQ ID NO: 5618 - DNA, 308 bp, Artificial Sequence
  Description of Artificial Sequence: Synthetic polynucleotide
cctgcccgtcacccctggagagccggcctccatctcctgcaggtctagtcagagcctcctgagtagtaatggattccactatttggattggtacgtgcagaagccagggcagtctccacaggtcctgatctatatgggttctaatcgggcctccggggtccctgagaggatcagtggcagtggatcaggcacagattttacactgaaaatcagcagagtggaggctgaggatgttggggtttattactgcatgcaagctctacaaactcctctcactttcggcggagggaccaaggtggagatcaaac

SEQ ID NO: 5619 - DNA, 337 bp, Artificial Sequence; identical to SEQ ID NO: 3398
  Description of Artificial Sequence: Synthetic polynucleotide

SEQ ID NO: 5620 - protein, 9 aa, Artificial Sequence
  Description of Artificial Sequence: Synthetic peptide
MQALQTPLT

SEQ ID NO: 5621 - DNA, 352 bp, Artificial Sequence
  Description of Artificial Sequence: Synthetic polynucleotide
gtgcagctggtgcagtctggggctgaggtgaagaagcctgggtcctcggtgaaggtctcctgcaaggctactggaggcagcttcgccaactatgcgatcagctgggtgcgacaggacgctggacaagggcttgagtggatgggacagatcatccctgtctttcgtacggcaacgtacgcacagaggttccagggcagagtcacgattaccgcggacgaatccacgagcacagcctacatggagctgagcagcctgagatctgaggacacggccgtttatttctgtgcgagagatagtggtgtggtggttatggacaactggggccagggaaccgtggtcaccgtctcctcag

SEQ ID NO: 5622 - DNA, 355 bp, Artificial Sequence; identical to SEQ ID NO: 3407
  Description of Artificial Sequence: Synthetic polynucleotide

SEQ ID NO: 5623 - protein, 11 aa, Artificial Sequence
  Description of Artificial Sequence: Synthetic peptide
ARDSGVVVMDN

SEQ ID NO: 5624 - DNA, 308 bp, Artificial Sequence
  Description of Artificial Sequence: Synthetic polynucleotide
cctgcccgtcacccctggagagccggcctccatctcctgcaggtctagtcagagcctcctacatagggatggatacaactatttgagttggtacctgcagaagccagggcagtctccacagctcctgatctatttgggttctaatcgggcctccggggtccctgacaggttcagtggcagtggatcaggcacagattttacactgaaaatcagcagagtggagtctgaggatgttggggtttattactgcatggaagctctacaaacccccctcactttcggcggagggaccaaggtggagatcaaac

SEQ ID NO: 5625 - DNA, 337 bp, Artificial Sequence; identical to SEQ ID NO: 3410
  Description of Artificial Sequence: Synthetic polynucleotide

SEQ ID NO: 5626 - protein, 9 aa, Artificial Sequence
  Description of Artificial Sequence: Synthetic peptide
MEALQTPLT

SEQ ID NO: 5627 - DNA, 351 bp, Artificial Sequence
  Description of Artificial Sequence: Synthetic polynucleotide
tgcagctggtgcagtctggggctgaggtgaagaagcctgggtcctcggtgaaggtctcctgcaaggcttctggaggcaccttcagcaactatgatatcagctgggtgcgacaggcccctggacaagggcttgagtggatgggagggatcatccctatctttggtacaccaaactacgcacagaagttccagggcagagtcacgattaccgcggacgaatccacgagcacagcctacatggagctgagcagcctgagatctgaggactcggccatttatttctgtgcgagagtgtccggggcgggatcctatgaccactggggccagggaaccctggtcaccgtctcctcag

SEQ ID NO: 5628 - DNA, 355 bp, Artificial Sequence; identical to SEQ ID NO: 4469
  Description of Artificial Sequence: Synthetic polynucleotide

SEQ ID NO: 5629 - protein, 11 aa, Artificial Sequence
  Description of Artificial Sequence: Synthetic peptide
ARVSGAGSYDH

SEQ ID NO: 5630 - DNA, 309 bp, Artificial Sequence
  Description of Artificial Sequence: Synthetic polynucleotide
cctgccccgtcacccctggagagccggcctccatctcctgcaggtctagtcagagcctcctgcatagtaatggatacaactatttggattggtacctgcagaagccagggcagtctccacagctcctgatctatttgggttctaatcgggcctccggggtccctgacaggttcagtggcagtggatcaggcacagattttacactgaaaatcagcagagtggaggctgaggatgttggggtttattactgcatgcaagctctacaaactccccggactttcggcggagggaccaaggtggagatcaaac

SEQ ID NO: 5631 - DNA, 337 bp, Artificial Sequence; identical to SEQ ID NO: 4472
  Description of Artificial Sequence: Synthetic polynucleotide

SEQ ID NO: 5632 - protein, 9 aa, Artificial Sequence
  Description of Artificial Sequence: Synthetic peptide
MQALQTPRT

SEQ ID NO: 5633 - DNA, 349 bp, Artificial Sequence
  Description of Artificial Sequence: Synthetic polynucleotide
cagctggtgcagtctggggctgaggtgaagaagcctgggtcctcggtgaaggtctcctgcaaggcttctggaggcaccttcagcaactatgctatcagctgggtgcgacaggcccctggacaagggcttgagtggatgggagatatcatccctatctttggaacagcaaactacgcacagaagttccaggggagagtcacgattaccgcggacgaatccacgagcacaggctacatggagctgaccaggctgaaatctgacgacacggccgtgtattactgtgcgagagatgggggcatggcctcctttgactactggggccagggaaccctggtcaccgtctcctcag

SEQ ID NO: 5634 - DNA, 355 bp, Artificial Sequence
  Description of Artificial Sequence: Synthetic polynucleotide
caggtgcagctggtgcagtctggggctgaggtgaagaagcctgggtcctcggtgaaggtctcctgcaaggcttctggaggcaccttcagcaactatgctatcagctgggtgcgacaggcccctggacaagggcttgagtggatgggagatatcatccctatctttggaacagcaaactacgcacagaagttccaggggagagtcacgattaccgcggacgaatccacgagcacaggctacatggagctgaccaggctgaaatctgacgacacggccgtgtattactgtgcgagagatgggggcatggcctcctttgactactggggccagggaaccctggtcaccgtctcctcag

SEQ ID NO: 5635 - protein, 11 aa, Artificial Sequence
  Description of Artificial Sequence: Synthetic peptide
ARDGGMASFDY

SEQ ID NO: 5636 - DNA, 308 bp, Artificial Sequence
  Description of Artificial Sequence: Synthetic polynucleotide
cctgcccgtcacccctggagagccggcctccatctcctgcaggtctagtcagagcctcctacataggactggatacaactatttggattggtacctgcagaagccagggcagtctccacagctcctgatctatttgggttctaatcgggcctccggggtccctgacaggttcagtggcagtggatcaggcacagattttacactgaaaatcagcagagtggaggctgaggatgttggggtttattactgcatgcaagctctacaaactcctcgaactttcggcggagggaccaaggtggagatcaaac

SEQ ID NO: 5637 - DNA, 337 bp, Artificial Sequence; identical to SEQ ID NO: 4688
  Description of Artificial Sequence: Synthetic polynucleotide

SEQ ID NO: 5638 - protein, 9 aa, Artificial Sequence
  Description of Artificial Sequence: Synthetic peptide
MQALQTPRT

SEQ ID NO: 5639 - DNA, 291 bp, Artificial Sequence
  Description of Artificial Sequence: Synthetic polynucleotide
  modified_base (9)..(9): a, c, t, g, unknown or other
  modified_base (11)..(11): a, c, t, g, unknown or other
  modified_base (14)..(14): a, c, t, g, unknown or other
  modified_base (27)..(30): a, c, t, g, unknown or other
taaggtgtncncangtgaggtgcaggnnnntggagtctgggggaggcttgctacagcctggggggtccctgagagtctcctgtgcagcctctggattcaccttcagtagatatgccatgaactggggccgattcaccatctccagagacgatgccaagaactcactgtatctgcaaatgaacagcctgagagacgcggacacggctgtctattactgtgcgacagagagttcggggagttattcctactttgactcctggggccagggaaccctggtcaccgtctcctcag

SEQ ID NO: 5640 - DNA, 361 bp, Artificial Sequence; identical to SEQ ID NO: 2093
  Description of Artificial Sequence: Synthetic polynucleotide

SEQ ID NO: 5641 - protein, 13 aa, Artificial Sequence
  Description of Artificial Sequence: Synthetic peptide
ATESSGSYSYFDS

SEQ ID NO: 5642 - DNA, 296 bp, Artificial Sequence
  Description of Artificial Sequence: Synthetic polynucleotide
cctgtctgcatctgtaggagacagagtcaccatcacttgccgggccagtcagagtatcagtaggtggttggcctggtatcagcagaaaccagggaaagcccctaagctcctgatctataaggcgtctagtttagaaaggggggtcccatcaaggttcagcggcagaggatctgggacagaattcactctcaccatcagcagcctgcagcctgatgattttgcaacttattactgccaacagtataatactttttccgcgctcactttcggcggagggaccaaggtggagatcaaac

SEQ ID NO: 5643 - DNA, 325 bp, Artificial Sequence; identical to SEQ ID NO: 2096
  Description of Artificial Sequence: Synthetic polynucleotide

SEQ ID NO: 5644 - protein, 10 aa, Artificial Sequence
  Description of Artificial Sequence: Synthetic peptide
QQYNTFSALT

SEQ ID NO: 5645 - DNA, 344 bp, Artificial Sequence
  Description of Artificial Sequence: Synthetic polynucleotide
ggtgcagctggtggagtctgggggaggcttggtacagcctggggggtccctgagactctcctgtgcagcctctggattcagcttcagcacctatgctatgaactgggtccgccaggctccagggaaggggctggagtggattgcatacatcagtgatactagtagtcagaactttgtgaggggccgattcaccgtgtccagagacaataccaagaactctctgtttctgcaaatgaacagcctgagagacgaggacaccgctgtctattactgtgcgagagcctcgcggtcctacaatttctttgacttctggggccagggaaccctggtctccgtctcctcag

SEQ ID NO: 5646 - DNA, 346 bp, Artificial Sequence; identical to SEQ ID NO: 1931
  Description of Artificial Sequence: Synthetic polynucleotide

SEQ ID NO: 5647 - protein, 12 aa, Artificial Sequence
  Description of Artificial Sequence: Synthetic peptide
ARASRSYNFFDF

SEQ ID NO: 5648 - DNA, 294 bp, Artificial Sequence
  Description of Artificial Sequence: Synthetic polynucleotide
tgtctgcttctgtaggagacagaatcaccatcacttgccgggccagtgagagtattaggacttggttggcctggtatcagcagaaaccagggaaagcccctaaactcctgatctataaggcgtctaatttagaagatggggtcccatcaagattcagcggcagtggatctgagacaagattcactctcaccatcagcagcctgcagcctgatgattttgcaacttattactgccaacagtataatacttactctcaggttactttcggcggagggaccaaggtcgagatcaaac

SEQ ID NO: 5649 - DNA, 325 bp, Artificial Sequence; identical to SEQ ID NO: 1934
  Description of Artificial Sequence: Synthetic polynucleotide

SEQ ID NO: 5650 - protein, 10 aa, Artificial Sequence
  Description of Artificial Sequence: Synthetic peptide
QQYNTYSQVT

SEQ ID NO: 5651 - DNA, 340 bp, Artificial Sequence
  Description of Artificial Sequence: Synthetic polynucleotide
tctgggggaggcttggtacagcctggggggtccctgagactctcctgtgcagcctctggtttcaccttcaatacttatgccatgaactgggtccgccaggctccagggaaggggctggagtgggttgcatacattagcagtggtagtagtgaaatgtattatgcagactctgtgaagggccgattcaccatctccagagacgatgccaagaactcactgtatctgcacatgagaagcctgagagacgaggacacggctgtctattactgtgcgagagtctcgcggtcctacaatttctttgactactggggccagggaaccctggtcaccgtctcctcag

SEQ ID NO: 5652 - DNA, 358 bp, Artificial Sequence; identical to SEQ ID NO: 1991
  Description of Artificial Sequence: Synthetic polynucleotide

SEQ ID NO: 5653 - protein, 12 aa, Artificial Sequence
  Description of Artificial Sequence: Synthetic peptide
ARVSRSYNFFDY

SEQ ID NO: 5654 - DNA, 296 bp, Artificial Sequence
  Description of Artificial Sequence: Synthetic polynucleotide
cctgtctgcatctgtgggagacagagtcaccatcacttgccgggccagtcagactattagtaggtggttggcctggtatcagcagaagccagggaaagcccctaaactcctcatctataaggcgtctactttagaaagtggggtcccatcaaggttcagcggcagtggatctgggacacaattcactctcaccatcagcagcctgcagcctgatgattttgcaacctactactgccaacagtataatacttattctgaggtcactttcggcggagggaccaaggtggagattaaac

SEQ ID NO: 5655 - DNA, 325 bp, Artificial Sequence; identical to SEQ ID NO: 1994
  Description of Artificial Sequence: Synthetic polynucleotide

SEQ ID NO: 5656 - protein, 10 aa, Artificial Sequence
  Description of Artificial Sequence: Synthetic peptide
QQYNTYSEVT

SEQ ID NO: 5657 - DNA, 342 bp, Artificial Sequence
  Description of Artificial Sequence: Synthetic polynucleotide
agtctgggggaggcttggtacagcctggggggtccctgacactctcctgtgcagcctctggattcaccttcagtgactatgccatgaactgggtccgccaggctccaggaaaggaactggaatgggtttcttacattagtactggaagtagtaccaaatattactcaggcactgtgaggggccgactcaccatctccagagacgatgccaagaactcactgtatcttcaaatagacaacctgagagacgagggcacggctgtgtattactgtgcgagagcctcgcggtcctacaatttctttgactactggggccagggaatcctggtcaccgtctcctcag

SEQ ID NO: 5658 - DNA, 358 bp, Artificial Sequence; identical to SEQ ID NO: 1997
  Description of Artificial Sequence: Synthetic polynucleotide

SEQ ID NO: 5659 - protein, 12 aa, Artificial Sequence
  Description of Artificial Sequence: Synthetic peptide
ARASRSYNFFDY

SEQ ID NO: 5660 - DNA, 294 bp, Artificial Sequence
  Description of Artificial Sequence: Synthetic polynucleotide
tgtctgcatctgtaggagacagagtcaccatcacttgccgggccagtcaatatattagtagctggttggcctggtatcagcagaaaccagggaaagcccctaaactcctgatctataaggcgtctaatttagaaagtggggtcccatcaaggttcagtggcagtggatctgggacagatttcattctcaccatcagcagcctgcagcctgatgattttgcaacttattactgccaacagtataatacttattctcaggtcactttcggcggagggaccaaggtggagatcaaac

SEQ ID NO: 5661 - DNA, 325 bp, Artificial Sequence; identical to SEQ ID NO: 2000
  Description of Artificial Sequence: Synthetic polynucleotide

SEQ ID NO: 5662 - protein, 10 aa, Artificial Sequence
  Description of Artificial Sequence: Synthetic peptide
QQYNTYSQVT

SEQ ID NO: 5663 - DNA, 343 bp, Artificial Sequence
  Description of Artificial Sequence: Synthetic polynucleotide
gagtctgggggaggcttggtacagcctggggggtccctgagactctcctgtgcagcctctggattcaccttcagaagttacgccatgaactgggtccgccaggctccagggaaggggctggaatggatttcatacattagtactggtagtagtgacatatattacgcagactctgtgaagggccgattcaccatctccagagacgatgccaagaactcactgtatctgcaagtgaacagcctgagagacgaggacacggctgtgtattactgtgcgagagcctcgtggtcctataattactttgactactggggccagggaaccctggtcaccgtctcctcag

SEQ ID NO: 5664 - DNA, 358 bp, Artificial Sequence; identical to SEQ ID NO: 2117
  Description of Artificial Sequence: Synthetic polynucleotide

SEQ ID NO: 5665 - protein, 12 aa, Artificial Sequence
  Description of Artificial Sequence: Synthetic peptide
ARASWSYNYFDY

SEQ ID NO: 5666 - DNA, 296 bp, Artificial Sequence
  Description of Artificial Sequence: Synthetic polynucleotide
cctgtctgcatctgtaggagacagagtcaccttcacttgccgggccagtcagaatattcttaggtggttggcctggtatcagcagaaaccagggaaagcccctaagctcctgatctataaggcgtctaatttagagagtggggtcccatcaaggttcagcggcagtggatctgggacagagttcactctcaccatcagcagcctacagcctgatgattttgcaacttattactgccaacagtataatactttttctgaggtcactttcggcggagggaccaaggtggagatcaaac

SEQ ID NO: 5667 - DNA, 325 bp, Artificial Sequence; identical to SEQ ID NO: 2120
  Description of Artificial Sequence: Synthetic polynucleotide

SEQ ID NO: 5668 - protein, 10 aa, Artificial Sequence
  Description of Artificial Sequence: Synthetic peptide
QQYNTFSEVT

SEQ ID NO: 5669 - DNA, 345 bp, Artificial Sequence
  Description of Artificial Sequence: Synthetic polynucleotide
agtctgggggaggcttggtacagcctggggggtccctgagactctcctgtgcagcctctggattcaccttcaggaccttcaacatgcactgggtccgccaggctccagggaaggggctggagtgggtttcatatatcagtgatactagtagtgaaacatactacggagactctgtggagggccgattcaccatctccagagacaatgccaagaactcactgtttctgcaaatgaacagcctgagagacgaggacacggctgtgtattactgtgtgagaccttccgaagcgggctatagttattttgaccactggggccggggaaccctggtcaccgtcgcctcag

SEQ ID NO: 5670 - DNA, 361 bp, Artificial Sequence; identical to SEQ ID NO: 3293
  Description of Artificial Sequence: Synthetic polynucleotide

SEQ ID NO: 5671 - protein, 13 aa, Artificial Sequence
  Description of Artificial Sequence: Synthetic peptide
VRPSEAGYSYFDH

SEQ ID NO: 5672 - DNA, 293 bp, Artificial Sequence
  Description of Artificial Sequence: Synthetic polynucleotide
cctgtctgcatctgtaggagacagagtcaccatcacttgccgggccagtcagactattagtaggtggttggcctggtatcagcaaaaaccagggaaagcccctaaactcctgatctataaggcgtctggtttagaaagtggggtcccaccaaggttcagcggcagtggatctgggacagaattcactctcaccatcagcagcctgcagcctgaggattttgcaacttattactgccaacaatataatacttattctcaactcactttcggcggagggaccaaggtggagatca

SEQ ID NO: 5673 - DNA, 322 bp, Artificial Sequence; identical to SEQ ID NO: 3296
  Description of Artificial Sequence: Synthetic polynucleotide

SEQ ID NO: 5674 - protein, 10 aa, Artificial Sequence
  Description of Artificial Sequence: Synthetic peptide
QQYNTYSQLT

SEQ ID NO: 5675 - DNA, 355 bp, Artificial Sequence
  Description of Artificial Sequence: Synthetic polynucleotide
gagtctgggggaggcttggtacagcctggggggtccctgagactctcgtgtgcagcctctggattcaccttcagtacttatagcatgaactgggtccgccaggctccagggaaggggctggagtgggtttcatacattagtagtggaagtacttccatatactacgcagactctgtgacgggccgattcaccatctccagagacgatgccaggaactcagtgtatctgcaaatgaacagcctgagagacgaggacacggctgtctattactgtgcgaaagagagatgtggtggtggtagctgttactccgtctttgactcctggggccagggaaccctggtcaccgtctcctcag

SEQ ID NO: 5676 - DNA, 370 bp, Artificial Sequence; identical to SEQ ID NO: 3347
  Description of Artificial Sequence: Synthetic polynucleotide

SEQ ID NO: 5677 - protein, 16 aa, Artificial Sequence
  Description of Artificial Sequence: Synthetic peptide
AKERCGGGSCYSVFDS

SEQ ID NO: 5678 - DNA, 294 bp, Artificial Sequence
  Description of Artificial Sequence: Synthetic polynucleotide
tgtctgcatctgtaggagacagagtcaccatcacttgccgggccagtcagactattagtagttggttggcctggtatcagcagaaaccagggaaagcccctaagctcctgatctatagggcgtctactttagaaactggggtcccatcaaggttcagcggcagtggatctgggacagctttcactctcaccatcagcagcctgcaccctgatgatttcgcaacttattactgccaacaatataatactttttcaaggctcactttcggcggagggaccaaggtggagatcaaac

SEQ ID NO: 5679 - DNA, 325 bp, Artificial Sequence; identical to SEQ ID NO: 3350
  Description of Artificial Sequence: Synthetic polynucleotide

SEQ ID NO: 5680 - protein, 10 aa, Artificial Sequence
  Description of Artificial Sequence: Synthetic peptide
QQYNTFSRLT

SEQ ID NO: 5681 - DNA, 355 bp, Artificial Sequence
  Description of Artificial Sequence: Synthetic polynucleotide
tggagtctgggggaggcttggtacagccgggggggtccctgagactctcctgtgtagcctctggattcaccttcaatagtcatagcatgaattgggtccgccaggctccagggaaggggctggagtgggtctcatacattagtactggtagtacttccatatactacgcagagtctgtggagggccgattcaccatctccagagacgatgccaagaactctctcggtctccaaatgaacagcctgagagacgaggacacggctgtgtattactgtgcgaaagagacttgtcgtggtggtaactgctactccttctttgactcctggggccagggaaccctggtcaccgtctcctc

SEQ ID NO: 5682 - DNA, 368 bp, Artificial Sequence; identical to SEQ ID NO: 3089
  Description of Artificial Sequence: Synthetic polynucleotide

SEQ ID NO: 5683 - protein, 16 aa, Artificial Sequence
  Description of Artificial Sequence: Synthetic peptide
AKETCRGGNCYSFFDS

SEQ ID NO: 5684 - DNA, 296 bp, Artificial Sequence
  Description of Artificial Sequence: Synthetic polynucleotide
cctgtctgcatctataggagacagagtcaccatcacttgccgggccagtcagagtattagtaggtggttggcctggtatcagcagaaaccagggaaagcccctaaactcctgatctataaggcgtctactttagaaagtggggtcccatcaaggttcagcggcagtggatctgggacagaattcactctcaccatcagcagcctgcagcctgatgatcttggaacttattactgccaacaatataatactttttcaaggctcactttcggcggagggaccaaggtggacatcaaac

SEQ ID NO: 5685 - DNA, 325 bp, Artificial Sequence; identical to SEQ ID NO: 3092
  Description of Artificial Sequence: Synthetic polynucleotide

SEQ ID NO: 5686 - protein, 10 aa, Artificial Sequence
  Description of Artificial Sequence: Synthetic peptide
QQYNTFSRLT

SEQ ID NO: 5687 - DNA, 349 bp, Artificial Sequence
  Description of Artificial Sequence: Synthetic polynucleotide
cagctggtgcagtctggggctgaggtgaagaagcctgggtcctcggtgaaggtctcctgcaaggcttctggaggcaacttcggcaactatgaaatcgtctgggtgcgacaggcccctggacaaggccttgagtgtatgggagggatcatccctttctttcgtacaccaaacttcgcacagaagttccagggcagattcactatcaccgcggacgaatccacgagcacagcctacatggagctggacagcctgagatctgacgacacggccgtctattactgtgcgagacgggggggttatgggtccttagacgactggggccagggaaccttggtcaccgtctcctcag

SEQ ID NO: 5688 - DNA, 355 bp, Artificial Sequence; identical to SEQ ID NO: 1967
  Description of Artificial Sequence: Synthetic polynucleotide

SEQ ID NO: 5689 - protein, 11 aa, Artificial Sequence
  Description of Artificial Sequence: Synthetic peptide
ARRGGYGSLDD

SEQ ID NO: 5690 - DNA, 309 bp, Artificial Sequence
  Description of Artificial Sequence: Synthetic polynucleotide
cctgccccgtcacccctggagagccggcctccatctcctgcaggtctagtcagagcctcctgcatagtactggatacaactatttggattggtatctgcagaagccagggcagtctccacagctcctgatctatttgggttctaatcgggcctccggggtccctgacaggttcagtggcagtggatcaggcacagattttacactgaaaatcagcagagtggaggctgaggatgttggggtatattactgcatgcaagctctacaaactcctcccaccttcggccaagggacacgactggagattaaac

SEQ ID NO: 5691 - DNA, 337 bp, Artificial Sequence; identical to SEQ ID NO: 1970
  Description of Artificial Sequence: Synthetic polynucleotide

SEQ ID NO: 5692 - protein, 9 aa, Artificial Sequence
  Description of Artificial Sequence: Synthetic peptide
MQALQTPPT

SEQ ID NO: 5693 - DNA, 380 bp, Artificial Sequence
  Description of Artificial Sequence: Synthetic polynucleotide
  modified_base (3)..(4): a, c, t, g, unknown or other
  modified_base (13)..(14): a, c, t, g, unknown or other
  modified_base (16)..(16): a, c, t, g, unknown or other
  modified_base (22)..(22): a, c, t, g, unknown or other
  modified_base (25)..(25): a, c, t, g, unknown or other
ccnncaaaggggnncntgtccncancaggtgcagctggtgcagtctggggctgaggtgaagaagcctgggtcctcggtgaaggtctcctgtaaggcttctggaggcaccttcagcaactatgccatcaattggatccgtcaggcccctggacaagggcttgagtggatgggagggatcatccctttctttggtacagcgaactacgcacagaagttccagggcagagtcacaattaccgcggacgagtccacgagcacagcctacatggagctgaccagtctgagatctggggacacggccatgtatttctgtgcgagagatggtggccacgcagactttgactactggggccagggaaccctggtcaccgtctcctcag

SEQ ID NO: 5694 - DNA, 355 bp, Artificial Sequence; identical to SEQ ID NO: 1859
  Description of Artificial Sequence: Synthetic polynucleotide

SEQ ID NO: 5695 - protein, 11 aa, Artificial Sequence
  Description of Artificial Sequence: Synthetic peptide
ARDGGHADFDY

SEQ ID NO: 5696 - DNA, 308 bp, Artificial Sequence
  Description of Artificial Sequence: Synthetic polynucleotide
cctgtccgtcagccctggacagccggcctccatctcctgcaggtctagtcagagcctcctgcatagaagtggctacaactatttggattggtacctgcagaagccagggcagtctccacagctcctaatctatttgggttctactcgggcctccggggtccctgacaggttcagtggcagtggatcaggcacagattttacactgaaaatcagccgagtggaggctgaggatgttggggtttattactgcatgcaagctgtacacactccgatcaccttcggccaagggacacgactggagattaaac

SEQ ID NO: 5697 - DNA, 337 bp, Artificial Sequence; identical to SEQ ID NO: 1862
  Description of Artificial Sequence: Synthetic polynucleotide

SEQ ID NO: 5698 - protein, 9 aa, Artificial Sequence
  Description of Artificial Sequence: Synthetic peptide
MQAVHTPIT

SEQ ID NO: 5699 - DNA, 349 bp, Artificial Sequence
  Description of Artificial Sequence: Synthetic polynucleotide
gtgcagctggtgcagtctggggctgaggtaaagaggcctgggtcctcggtgaaggtctcctgcaaggcttctggaggcaccttcaacacctttactatcacctgggtgcgacaggcccctggacaggcgcctgagtggatgggaggaatcatccctgtctttggaacaccagactacgcacagaggttccagggcagactcaccattaccgcggacgaatccacggctacaggcttcatggaactgagtactttgagccctgaggacacggccatgtattactgtgcgagagcgggagtcggggcaattgactactggggccagggaaccctggtcatcgtctcctcag

SEQ ID NO: 5700 - DNA, 352 bp, Artificial Sequence; identical to SEQ ID NO: 2525
  Description of Artificial Sequence: Synthetic polynucleotide

SEQ ID NO: 5701 - protein, 10 aa, Artificial Sequence
  Description of Artificial Sequence: Synthetic peptide
ARAGVGAIDY

SEQ ID NO: 5702 - DNA, 308 bp, Artificial Sequence
  Description of Artificial Sequence: Synthetic polynucleotide
cctgcccgtcacccctggagagccggcctccatctcctgcaggtctagtcagagtctcctgcatagcaatggatacaactatgtggattggtacctgcagaagccagggcagtctccacaactcctgatctatttgggttctgatcgggcctccggggtccctgacaggttcagtggcagtggatcaggcacatattttacactggagatcagcagagtggaggctgaggatgttggggtttattactgcatgcaaggtctacgaacccctctcaccttcggccaaggtacacgactggagattaaac

SEQ ID NO: 5703 - DNA, 337 bp, Artificial Sequence; identical to SEQ ID NO: 2528
  Description of Artificial Sequence: Synthetic polynucleotide

SEQ ID NO: 5704 - protein, 9 aa, Artificial Sequence
  Description of Artificial Sequence: Synthetic peptide
MQGLRTPLT

SEQ ID NO: 5705 - DNA, 352 bp, Artificial Sequence
  Description of Artificial Sequence: Synthetic polynucleotide
gtgcagctggtgcagtctggggctgaggtgaagaagcctgggtcctcggtgaaggtctcctgcaaggcttctggaggcaccttcagcaactatgctatcagctgggtgcgacaggcccctggacaagggcttgagtggatgggagacatcatccctctctttgggacaccaaattacgcacagaggttccagggcagagtcgcgattaccgcggacgcatctacgagcacagcctacttggaactgaccagcctgagatctgacgacacggccgtgtattactgtgcgagagatggaggacaagcgtctttagactactggggccagggaacccgactcaccgtctccacag

SEQ ID NO: 5706 - DNA, 355 bp, Artificial Sequence; identical to SEQ ID NO: 2915
  Description of Artificial Sequence: Synthetic polynucleotide

SEQ ID NO: 5707 - protein, 11 aa, Artificial Sequence
  Description of Artificial Sequence: Synthetic peptide
ARDGGQASLDY

SEQ ID NO: 5708 - DNA, 308 bp, Artificial Sequence
  Description of Artificial Sequence: Synthetic polynucleotide
cctgtccgtcacccctggagagccggcctccatctcctgcaggtctagtcagagtctcctgcatagaagtggatacacctatttggattggtacctgcagaagccagggcagtctccacggctcctgatctatttggcttctaatcgggcctccggggtccctgacaggttcagtggcagtggatcaggcacagattttacactgaaaatcagcagagtggaggctgaggatgtgggcgtttattactgcatgcaagctctacaaactcctaagaccttcggccaagggacacgactggagattaaac

SEQ ID NO: 5709 - DNA, 337 bp, Artificial Sequence; identical to SEQ ID NO: 2918
  Description of Artificial Sequence: Synthetic polynucleotide

SEQ ID NO: 5710 - protein, 9 aa, Artificial Sequence
  Description of Artificial Sequence: Synthetic peptide
MQALQTPKT

SEQ ID NO: 5711 - DNA, 352 bp, Artificial Sequence
  Description of Artificial Sequence: Synthetic polynucleotide
gtgcagctggtgcagtctgggactgaggtgaagaagcctgggtcctcggtgaaggtctcctgcaaggcctctggaggcaccttcgggaactatgatatcagctgggtgcgacaggcccccggacaagggcttgagtggatgggagggctcatccctgtctttggaacacccaactacgcaccgaaattgcggggcagactcacgattaccgcggacgaatccacgagcacagcctacatggagctgagcagcctgagatctgaggacacggccgtttatttctgtgcgagagatgggggacaagcgtcttttgactactggggccagggaaccctggtcgccgtctcctcag

SEQ ID NO: 5712 - DNA, 355 bp, Artificial Sequence; identical to SEQ ID NO: 3233
  Description of Artificial Sequence: Synthetic polynucleotide

SEQ ID NO: 5713 - protein, 11 aa, Artificial Sequence
  Description of Artificial Sequence: Synthetic peptide
ARDGGQASFDY

SEQ ID NO: 5714 - DNA, 308 bp, Artificial Sequence
  Description of Artificial Sequence: Synthetic polynucleotide
cctgcccgtcacccctggagagccggcctccatctcctgcaggtctagtcagagcctcctgcatcgtactggatacacctatttggattggtacctgcagaagccagggcagtctccacagctcctgatctacttgggttctaatcgggcctccggggtccctgacaggttcagtggcagtggctcaggcacagattttacactgaaaatcagcagagtggaggctgaggatgttggagtttattactgcatgcaagctctacaaactcctaagactttcggccaagggacacgactggagattaaac

SEQ ID NO: 5715 - DNA, 337 bp, Artificial Sequence; identical to SEQ ID NO: 3236
  Description of Artificial Sequence: Synthetic polynucleotide

SEQ ID NO: 5716 - protein, 9 aa, Artificial Sequence
  Description of Artificial Sequence: Synthetic peptide
MQALQTPKT

SEQ ID NO: 5717 - DNA, 355 bp, Artificial Sequence
  Description of Artificial Sequence: Synthetic polynucleotide
gtgcagctggtgcagtctggggctgaggtgaggaagcctgggtcctcggtgagggtctcctgcaggtcttccggaggcaccttcagcacctatgaaatcagctgggtgcgacaggcccctggacagggacttacgtggatgggaggtatcatccctgtctttggttcagcaaactatgctcagaagttccagggcagactcacgattaccgcggacgaatccacgagcacagtctacatggagttgagcagtctgacatctgaggacacggccgtctatttctgtgcgagagacggtgggagcctccccagttttgactactggggccagggaaccctggtcaccgtctcctcag

SEQ ID NO: 5718 - DNA, 358 bp, Artificial Sequence; identical to SEQ ID NO: 4109
  Description of Artificial Sequence: Synthetic polynucleotide

SEQ ID NO: 5719 - protein, 12 aa, Artificial Sequence
  Description of Artificial Sequence: Synthetic peptide
ARDGGSLPSFDY

SEQ ID NO: 5720 - DNA, 308 bp, Artificial Sequence
  Description of Artificial Sequence: Synthetic polynucleotide
cctgttcgtcacccctggagagccggcctccatctcctgcaggtctggtcagagcctcctccatagaaatggatacaatcatttggattggtacctgcagaagccagggcagtctccacagctcctgatctatttgggttctaatcgggcctccggggtccctgacaggttcagtggcagtggatcaggcacagattttacactgaaaatcagcagagtggaggctgaggatgttggggtttatttctgcatgcaatctctacaaactcctcgcaccttcggccaagggacacgactgggaattaaac

SEQ ID NO: 5721 - DNA, 337 bp, Artificial Sequence; identical to SEQ ID NO: 4112
  Description of Artificial Sequence: Synthetic polynucleotide

SEQ ID NO: 5722 - protein, 9 aa, Artificial Sequence
  Description of Artificial Sequence: Synthetic peptide
MQSLQTPRT

SEQ ID NO: 5723 - DNA, 351 bp, Artificial Sequence
  Description of Artificial Sequence: Synthetic polynucleotide
tgcagctggtgcagtctggggctgaggtgaggaagcctgggtcctcggtgaaggtctcctgcaaggcctcaggaggcaccttcagtaactatgctatcagttgggtgcgacaggccccgggacacgggcttgagtggatgggagggattatccctttctttggtaaaccaaactactcacagaagttccggggcagagtcaccattaccgcggacgaatctacgagcacagcctacatggaactggccagcctgaaatctgacgacacggccatctattactgtgcgagagagggggggctacgaaactttgactactggggccagggaaccctggtcaccgtctcctcag

SEQ ID NO: 5724 - DNA, 355 bp, Artificial Sequence; identical to SEQ ID NO: 4451
  Description of Artificial Sequence: Synthetic polynucleotide

SEQ ID NO: 5725 - protein, 11 aa, Artificial Sequence
  Description of Artificial Sequence: Synthetic peptide
AREGGLRNFDY

SEQ ID NO: 5726 - DNA, 308 bp, Artificial Sequence
  Description of Artificial Sequence: Synthetic polynucleotide
cctgcccgtcacccctggagagccggcctccatctcctgcaggtctagtcagagcctcctgcataggagtggagacaactatttggattggtatctgcagaagccagggcagtctccacagctcctgatctattggggttctaatcgggcctccggggtccctgataggttcagtggcagtggatcaggcacagattttacactgaaaatcagcagagtggaggctggggatgttggggtttattactgcatgcaagctctacaaccctcgatcaccttcggccaagggacacgactggagatcaaac

SEQ ID NO: 5727 - DNA, 337 bp, Artificial Sequence; identical to SEQ ID NO: 4454
  Description of Artificial Sequence: Synthetic polynucleotide

SEQ ID NO: 5728 - protein, 9 aa, Artificial Sequence
  Description of Artificial Sequence: Synthetic peptide
MQALQPSIT

SEQ ID NO: 5729 - DNA, 348 bp, Artificial Sequence
  Description of Artificial Sequence: Synthetic polynucleotide
tgcagctggtgcagtctggggctgaagtgaagaagcctgggtcctcggtgaaggtctcctgcagggcttctggaggcaccttcagcaattatcctatcacgtgggtgcgacaggcccctggacaaggacttgagtggatgggacgaatcatccctgtctttcgtacaccgaacttcgcacagaagttccagggcagagtctccattaccgcggacgagtccacgagcacagcctatatggagctgagcagtctgagatctgaggacacggccgtctattactgtgcgagatcgtccggttttccatcgcttgactactggggccagggaacccttgtcaccgtgtcct

SEQ ID NO: 5730 - DNA, 352 bp, Artificial Sequence; identical to SEQ ID NO: 1187
  Description of Artificial Sequence: Synthetic polynucleotide

SEQ ID NO: 5731 - protein, 11 aa, Artificial Sequence
  Description of Artificial Sequence: Synthetic peptide
ARSSGFPSLDY

SEQ ID NO: 5732 - DNA, 472 bp, Artificial Sequence
  Description of Artificial Sequence: Synthetic polynucleotide
  modified_base (119)..(119): a, c, t, g, unknown or other
tcagggggtttcatctcggttcagcggcagtggatctgggagagatttcactctcaccatcagcagcctgcagcctgaagatgttgcagtttatttctgtcaaaagtttaccagtctcntccggcggagggaccaaggtgaaggatcgaaattgtgttgacgcagtctccaggcaccctgtctttgcctccaggggaaagagccaccctctcctgcagggccagtcagagtgttaacagcgactacttagcctggtaccagcagaagcctggccaggctcccaggctcctcatctatggtgcatccaccagggccactggcatccccgcgaggttcagtggcagtggctctgggacagacttcactctcaccatcagcagactggagcctgaagatgttgcagtgtattactgtcaacagcatggtagctcaccgtacacttttggccaggggaccaagctggagatcaaac

SEQ ID NO: 5733 - DNA, 325 bp, Artificial Sequence; identical to SEQ ID NO: 1190
  Description of Artificial Sequence: Synthetic polynucleotide

SEQ ID NO: 5734 - protein, 9 aa, Artificial Sequence
  Description of Artificial Sequence: Synthetic peptide
QQHGSSPYT

SEQ ID NO: 5735 - DNA, 344 bp, Artificial Sequence
  Description of Artificial Sequence: Synthetic polynucleotide
gtgcagctggtgcagtctggggctgaagtgaagaagcctgggtcttcggtgaaggtctcctgcaaggcttctggaggcaccttcagcaactatgctatcagctgggtgcgacaggcccctggacaagggcttgagtggatgggagagatcatccctgtctttggtacaccaacgtacgcacagaagttccagggcagagtcacaattaccgcggacgaatcttcgagaacagcctacatggaggtgaacagactgagatctgacgacacggccgtgtattactgtgcgagaggcgtttggggatttgactactggggccagggaaccctggtcaccgtctcctc

SEQ ID NO: 5736 - DNA, 347 bp, Artificial Sequence; identical to SEQ ID NO: 2705
  Description of Artificial Sequence: Synthetic polynucleotide

SEQ ID NO: 5737 - protein, 9 aa, Artificial Sequence
  Description of Artificial Sequence: Synthetic peptide
ARGVWGFDY

SEQ ID NO: 5738 - DNA, 293 bp, Artificial Sequence
  Description of Artificial Sequence: Synthetic polynucleotide
cctgtctttgtctccaggggagagagccaccctctcctgcagggccagtcagagtgttgacagcagctacttagcctggtaccaacagagacctggccaggctcccaggctcctcatctatggtgcatccaccagggccactggcatcccagacaggttcagtggcagtgggtctgggacagacttcactctcaccatcagcagactggagcctgacgattttgcagtgtattactgtcatcactatggtacctcacgaacttttggcctggggaccaagctggagatcaaac

SEQ ID NO: 5739 - DNA, 322 bp, Artificial Sequence; identical to SEQ ID NO: 2708
  Description of Artificial Sequence: Synthetic polynucleotide

SEQ ID NO: 5740 - protein, 8 aa, Artificial Sequence
  Description of Artificial Sequence: Synthetic peptide
HHYGTSRT

SEQ ID NO: 5741 - DNA, 355 bp, Artificial Sequence
  Description of Artificial Sequence: Synthetic polynucleotide
gtgcagctggtgcagtctggggctgaggtgaagaagcctgggtcctcggtgaaggtctcctgcaagtcttctggaggcaacttcaacaactttgccatctggtgggtgcgacaggcccctggacaaggacttgagtggatgggagggatcatccctgcttttggttcagcaaactacgcacagaaattccggggcagagtcacgattaccgcggacgtatccacgaggacggcctacatggaactgagtagcctgagatctgaggacacggccctatattattgtgcgagagatggcggggttactctaggatttgaatattggggccagggaaccctggtcaccgtctcctcag

SEQ ID NO: 5742 - DNA, 358 bp, Artificial Sequence; identical to SEQ ID NO: 2777
  Description of Artificial Sequence: Synthetic polynucleotide

SEQ ID NO: 5743 - protein, 12 aa, Artificial Sequence
  Description of Artificial Sequence: Synthetic peptide
ARDGGVTLGFEY

SEQ ID NO: 5744 - DNA, 293 bp, Artificial Sequence
  Description of Artificial Sequence: Synthetic polynucleotide
cctgtatttgtctccaggggaaagagccaccgtctcctgcagggccagtcagagtgtcagcagcgactacttagcctggtaccagcagagacctggccaggctcccagactcctcatctatggtgcatccagcagggccactggcatcccagacaggttcagtggcagtgggtctgggacagacttcactctcaccatcagcagactggagcctgaagattttgcagtttattactgtcagcagtatggtggcccgtacacttttggccaggggaccaggctgcagatcaaac

SEQ ID NO: 5745 - DNA, 322 bp, Artificial Sequence; identical to SEQ ID NO: 2780
  Description of Artificial Sequence: Synthetic polynucleotide

SEQ ID NO: 5746 - protein, 8 aa, Artificial Sequence
  Description of Artificial Sequence: Synthetic peptide
QQYGGPYT

SEQ ID NO: 5747 - DNA, 331 bp, Artificial Sequence
  Description of Artificial Sequence: Synthetic polynucleotide
ggggctgacgtgaagaagcctgggtcctcggtgaaggtctcctgcaaggcttctggaggcacgttcagcacctctaccatcagctgggtgcgacaggcccctggacaagggcttgagtggatgggagggatcatccctatttttggtacagcaaactacgctcagaagttccagggcagagtcacaattaccgcggacgaatccacgagcacagcctacatggatctgagcggcctgagatctgaggacacggccgtctattactgtgcgagtgggacctacgtcctccttgactactggggccagggaaccctggtcaccgtctcctcag

SEQ ID NO: 5748 - DNA, 352 bp, Artificial Sequence; identical to SEQ ID NO: 3401
  Description of Artificial Sequence: Synthetic polynucleotide

SEQ ID NO: 5749 - protein, 10 aa, Artificial Sequence
  Description of Artificial Sequence: Synthetic peptide
ASGTYVLLDY

SEQ ID NO: 5750 - DNA, 317 bp, Artificial Sequence
  Description of Artificial Sequence: Synthetic polynucleotide
  modified_base (6)..(12): a, c, t, g, unknown or other
  modified_base (14)..(14): a, c, t, g, unknown or other
atgacnnnnnnntncagtctccctgtctttgtctccaggggaaagagccaccctctcctgcagggccagtcagagtgttagcagcgactacttaacctggtaccaacagaaacctggccaggctcccaggctcctcatctatggtgcatccagcagggccactggcatcccagacaggttcagtggcagtgcgtctgggacagacttcactctcaccatcagcagactggagcctgaagattttgcagtgtattactgtcatcagtatggtagctcaccgtacacttttggccaggggaccaagctggagatcaaac

SEQ ID NO: 5751 - DNA, 325 bp, Artificial Sequence; identical to SEQ ID NO: 3404
  Description of Artificial Sequence: Synthetic polynucleotide

SEQ ID NO: 5752 - protein, 9 aa, Artificial Sequence
  Description of Artificial Sequence: Synthetic peptide
HQYGSSPYT

SEQ ID NO: 5753 - DNA, 344 bp, Artificial Sequence
  Description of Artificial Sequence: Synthetic polynucleotide
  modified_base (340)..(340): a, c, t, g, unknown or other
gcagctggtgcagtctggggctgagatgaagaagcctgggtcctcggtgaaggtctcctgcaaggcttctggaggctccttcagcacctttcctatcaactgggtgcgacaggcccctggacaaggacttgaggtgatgggaggagtcatccctgtctttcgtacaccaaactacgcagagaagttccagggcagagtcacaattaccgcggacgaatccacgagcacagtctacttggagttgagcagcctgacatctgaggacacggccatatattactgtgcgagagataactggggttttgactactggggccagggaaccctgatcaccgtctcntcag

SEQ ID NO: 5754 - DNA, 349 bp, Artificial Sequence; identical to SEQ ID NO: 3047
  Description of Artificial Sequence: Synthetic polynucleotide
  modified_base (345)..(345): a, c, t, g, unknown or other

SEQ ID NO: 5755 - protein, 9 aa, Artificial Sequence
  Description of Artificial Sequence: Synthetic peptide
ARDNWGFDY

SEQ ID NO: 5756 - DNA, 296 bp, Artificial Sequence
  Description of Artificial Sequence: Synthetic polynucleotide
cctgtctttgtctccaggggaaagagccaccctctcctgcagggccagtcagactgttaacagcgactacttcgcctggtaccagcagaaacctggccaggctcccagtctcctcatctatggtacatccacaagggccaccggcatcccagacaggttcagtggcagtgggtctgggacagacttcactctcaccatcagcagactggagcctgaagattttgcagtgtatttctgtcagcagtatggtaggtcgccgtacacttttggcaaggggaccaagctggagatcaaac

SEQ ID NO: 5757 - DNA, 325 bp, Artificial Sequence; identical to SEQ ID NO: 3050
  Description of Artificial Sequence: Synthetic polynucleotide

SEQ ID NO: 5758 - protein, 9 aa, Artificial Sequence
  Description of Artificial Sequence: Synthetic peptide
QQYGRSPYT

SEQ ID NO: 5759 - DNA, 343 bp, Artificial Sequence
  Description of Artificial Sequence: Synthetic polynucleotide
cagctggtgcagtctggggctgaagtgaagaagcctgggtcctcggtgaaggtctcctgcaaggcctctggaggcaccttcagcaactatgctatcaactgggtgcgacaggcccctggacaagggcttgagtggatgggagacatcatccctgtctttgggacaccaaactacgcaccgaatttccagggccgagtcatcattaccgcggacgaatccacgagcacagcctacatggagctgagcagcctgagatctgacgacacggccgtatattactgtgcgagaggcgtttgggggtgggactactggggccagggaaccctggtcaccgtctcctcag

SEQ ID NO: 5760 - DNA, 349 bp, Artificial Sequence; identical to SEQ ID NO: 3119
  Description of Artificial Sequence: Synthetic polynucleotide

SEQ ID NO: 5761 - protein, 9 aa, Artificial Sequence
  Description of Artificial Sequence: Synthetic peptide
ARGVWGWDY

SEQ ID NO: 5762 - DNA, 294 bp, Artificial Sequence
  Description of Artificial Sequence: Synthetic polynucleotide
cctgtctttgtctccgggggaaagagccaccctctcctgcagggccactcagagtgttagcagcgactacttagcctggtaccagcagaaacctggccaggctcccaggctcctcatctatggtgcatccgccagggccactggcatcccagacaggttcagtggcagtgtttctgggacagacttcactctcaccgtcagcagactggagcctgaagattttgcagtgtatttctgtcagcagtatggtagctcacctttcacttttggccaggggaccaagttggagatcaa

SEQ ID NO: 5763 - DNA, 323 bp, Artificial Sequence; identical to SEQ ID NO: 3122
  Description of Artificial Sequence: Synthetic polynucleotide

SEQ ID NO: 5764 - protein, 9 aa, Artificial Sequence
  Description of Artificial Sequence: Synthetic peptide
QQYGSSPFT

SEQ ID NO: 5765 - DNA, 346 bp, Artificial Sequence
  Description of Artificial Sequence: Synthetic polynucleotide
cagctggtgcagtctggggctgaggtgaagaggcctgggtcctcggtgaaggtctcctgcaaggcctctggaggcaccttcaggacctctactatcagctgggtccgacaggcccccggacaacggcttgagtggatgggagggattatcccaacctttggaacagcaaactacgcacagaaattccagggcagaatgacgatcagtgcggacgaatccacgagcactgcctacatggagttgagcagcctgaaatctgaggacacggccgtgtattactgcgcgattgggacctacgtacccttggactactggggccagggaaccctggtcaccgtctcctcag

SEQ ID NO: 5766 - DNA, 352 bp, Artificial Sequence; identical to SEQ ID NO: 4115
  Description of Artificial Sequence: Synthetic polynucleotide

SEQ ID NO: 5767 - protein, 10 aa, Artificial Sequence
  Description of Artificial Sequence: Synthetic peptide
AIGTYVPLDY

SEQ ID NO: 5768 - DNA, 296 bp, Artificial Sequence
  Description of Artificial Sequence: Synthetic polynucleotide
cctgtctttgtctccaggggaaagagccaccctctcctgcagggccagtcagagtgttaacagcgactacttaacctggtaccagcagaaacctggccaggctcccaggctcctcatctatagtacatccagcagggccactggcatcccagacaggttcagtggcagtgggtctgggacagacttcagtctcaccatcagcagactggagcctgaagattttgcagtgtattactgtcagcagtatgctaactcacctcagacttttggccaggggaccaggctggagatcaaac

SEQ ID NO: 5769 - DNA, 325 bp, Artificial Sequence; identical to SEQ ID NO: 4118
  Description of Artificial Sequence: Synthetic polynucleotide

SEQ ID NO: 5770 - protein, 9 aa, Artificial Sequence
  Description of Artificial Sequence: Synthetic peptide
QQYANSPQT

SEQ ID NO: 5771 - DNA, 352 bp, Artificial Sequence
  Description of Artificial Sequence: Synthetic polynucleotide
gtgcagctggtgcagtctggggctgaggtgaagaagcctgggtcctcggtgaaggtctcctgcaaggcttctggaggcatcttcagcaactttgaaatcagctgggtgcgacaggcccctggacaaggtcttgagtggatgggaggggtcatccctttctttggtacagcaaagtatgcacagaagttccagggcagagtcacgattagcgcggacacatccacgagcacaggctacatggagctgagcagcctgagatctgaggacacggccgtatattactgtgcgagagacgatggttcagggagttatgcctactggggccagggaaccctggtcaccgtctcctcag

SEQ ID NO: 5772 - DNA, 355 bp, Artificial Sequence; identical to SEQ ID NO: 2573
  Description of Artificial Sequence: Synthetic polynucleotide

SEQ ID NO: 5773 - protein, 11 aa, Artificial Sequence
  Description of Artificial Sequence: Synthetic peptide
ARDDGSGSYAY

SEQ ID NO: 5774 - DNA, 309 bp, Artificial Sequence
  Description of Artificial Sequence: Synthetic polynucleotide
cctgccccgtcacccctggagagtcggcctccatctcctgcaggtctagtcagagcctcctacatcgtagtggatacaactatttggattggtacctgcagaagccagggcagtctccacagctcctgatctatttgggttctaatcgggcctccggggtccctgacaggttcagtggcagtggatcaggcacagattttacactgaaaatcagcagagtggaggctgaggatgttggggtttattactgcatgcaagctctacaaactcctcggacgttcggccaagggaccaaggtggaaatcaaac

SEQ ID NO: 5775 - DNA, 337 bp, Artificial Sequence; identical to SEQ ID NO: 2576
  Description of Artificial Sequence: Synthetic polynucleotide

SEQ ID NO: 5776 - protein, 9 aa, Artificial Sequence
  Description of Artificial Sequence: Synthetic peptide
MQALQTPRT

SEQ ID NO: 5777 - DNA, 343 bp, Artificial Sequence
  Description of Artificial Sequence: Synthetic polynucleotide
cagtctggggctcaggtgaagaagcctgggtcctcggtgaaggtttcctgcaaggcttttggaggcaacttcaacaactttggtttccactgggtgcgacaggcccctggacaagggcttgagtggatgggaaggatcatccctatttttggtacagcagacagcgcacagaagtttcagggcagagtcacgatttccgccgacaaatccacgaccacagtttacatggaactgagcagcctgagatttgaggacacggccatgtattattgtgcgagagaaggggggggggacgcggcctttgactattggggccagggaaccctggtcaccgtctcctcag

SEQ ID NO: 5778 - DNA, 358 bp, Artificial Sequence; identical to SEQ ID NO: 2633
  Description of Artificial Sequence: Synthetic polynucleotide

SEQ ID NO: 5779 - protein, 12 aa, Artificial Sequence
  Description of Artificial Sequence: Synthetic peptide
AREGGGDAAFDY

SEQ ID NO: 5780 - DNA, 309 bp, Artificial Sequence
  Description of Artificial Sequence: Synthetic polynucleotide
cctgccccgtcacccctggagagccggcctccatctcctgcaggtctagtcagagcctcctgcataggaatggatacaactatttggattggtacctgcagaagccagggcagtctccacaactgctgatctatttgggttctaatcgggcctccggggtccctgacaggttcagtggcactggatcaggcacagattttatactgaaaatcagcagagtggaggctgaggatgttggggtttattactgcatgcaagctctacaaactcctcggacgttcggccaagggaccaaggtggaaatcaaac

SEQ ID NO: 5781 - DNA, 337 bp, Artificial Sequence; identical to SEQ ID NO: 2636
  Description of Artificial Sequence: Synthetic polynucleotide

SEQ ID NO: 5782 - protein, 9 aa, Artificial Sequence
  Description of Artificial Sequence: Synthetic peptide
MQALQTPRT

SEQ ID NO: 5783 - DNA, 355 bp, Artificial Sequence
  Description of Artificial Sequence: Synthetic polynucleotide
gtgcagctggtgcagtctggggctgaggtgaggaggccagggtcctcggtgaaggtctcctgcaaggcttctgggggcaacttcaacaactacggtttccactgggtgcgacaggcccctggacaaggacttgagtggatgggagggatcatccctgtctttggtacaccaaactacgcacagaaattccagggcagagtcacgattaccgcggacaaatccgcgagtgtggtctacttgaacctgaacagcctgaaattcgacgacacggccgtatattactgtgcgagagaggcaggggccctagcctccttagactattggggccagggaaccctggtcaccgtctcctcag

SEQ ID NO: 5784 - DNA, 358 bp, Artificial Sequence; identical to SEQ ID NO: 2765
  Description of Artificial Sequence: Synthetic polynucleotide

SEQ ID NO: 5785 - protein, 12 aa, Artificial Sequence
  Description of Artificial Sequence: Synthetic peptide
AREAGALASLDY

SEQ ID NO: 5786 - DNA, 331 bp, Artificial Sequence
  Description of Artificial Sequence: Synthetic polynucleotide
  modified_base (16)..(16): a, c, t, g, unknown or other
  modified_base (19)..(19): a, c, t, g, unknown or other
gtgatgactcagtctncantctccctgcccgtcacccctggagagccggcctccatctcctgcaggtctagtcagagcctccttcatagaaatggagacaactatttggaatggtatctgcagaagccagggcagcctccacaggtcctgatctacttgggttctaatcgggcctccggggtccctgacaggttcagtggcagtggagcaggcacagattttacactgaaaatcagcagagtggaggctgaggatgttggggtttattactgcatgcaatctctacaaactcctcgtacgttcggccaagggaccaaggtggaaatcaaac

SEQ ID NO: 5787 - DNA, 337 bp, Artificial Sequence; identical to SEQ ID NO: 2768
  Description of Artificial Sequence: Synthetic polynucleotide
  modified_base (22)..(22): a, c, t, g, unknown or other
  modified_base (25)..(25): a, c, t, g, unknown or other

SEQ ID NO: 5788 - protein, 9 aa, Artificial Sequence
  Description of Artificial Sequence: Synthetic peptide
MQSLQTPRT

SEQ ID NO: 5789 - DNA, 338 bp, Artificial Sequence
  Description of Artificial Sequence: Synthetic polynucleotide
tggggctgagttgaagaagcctgggtcctcggtgaaggtctcctgcaaggcttctggatacaccttcaacaactttgctatcgattgggtgcgacaggcccctggacaagggcttgagtggatgggaggcatcatccctgtctttggtacaccaaccttcgcacagaagttccacggcagagtcacgatcaccgcggacaaagtcacgagcacagtctacatggagttgcccagcctgagatttgaggacacggccgtttattactgtgcgagagaagggggggggagcccggcgcttgactactggggccagggaaccctggtcaccgtctcctcag

SEQ ID NO: 5790 - DNA, 358 bp, Artificial Sequence; identical to SEQ ID NO: 3359
  Description of Artificial Sequence: Synthetic polynucleotide

SEQ ID NO: 5791 - protein, 12 aa, Artificial Sequence
  Description of Artificial Sequence: Synthetic peptide
AREGGGSPALDY

SEQ ID NO: 5792 - DNA, 306 bp, Artificial Sequence
  Description of Artificial Sequence: Synthetic polynucleotide
cctgcccgtcacccctggagagccggcctccatctcctgcaggtctagtcagagcctcctgcatcgtgatgggaacaactatttggattggtacctgcagaagccagggcagtctccacagctcctgatctatttgggttctaatcgggcctccggggtccctgacaggttcagtggcagtggatcaggcacagattttacactgaaaatcagcagagtggaggctgaggatgttggggtttattactgcatgcaagctatacaaactcctcgcacgttcggcccagggaccaaggtggaaatcaa

SEQ ID NO: 5793 - DNA, 335 bp, Artificial Sequence; identical to SEQ ID NO: 3362
  Description of Artificial Sequence: Synthetic polynucleotide

SEQ ID NO: 5794 - protein, 9 aa, Artificial Sequence
  Description of Artificial Sequence: Synthetic peptide
MQAIQTPRT

SEQ ID NO: 5795 - DNA, 355 bp, Artificial Sequence
  Description of Artificial Sequence: Synthetic polynucleotide
gtgcagctggtgcagtctggggctgaggtgaagaagccggggtcctcggtgaaggtctcctgcaaggcttctggaggcatcttcaacaactatgctatcagctgggtgcgacaggcccctggacaagggcttgagtggatgggagagatcatccctgtctttggtacagcaaactacgcacagaagttccagggcagagtcacaataaccgcggacaaatccacgagcacagcctacatggaggtgagcagcctgaaatctgaggacacggccgtgtattattgtgcgagagacggcggagccagtgcgagctacgactactggggccagggaaccctggtcaccgtctcctcag

SEQ ID NO: 5796 - DNA, 358 bp, Artificial Sequence; identical to SEQ ID NO: 4049
  Description of Artificial Sequence: Synthetic polynucleotide

SEQ ID NO: 5797 - protein, 12 aa, Artificial Sequence
  Description of Artificial Sequence: Synthetic peptide
ARDGGASASYDY

SEQ ID NO: 5798 - DNA, 309 bp, Artificial Sequence
  Description of Artificial Sequence: Synthetic polynucleotide
  modified_base (106)..(106): a, c, t, g, unknown or other
  modified_base (108)..(108): a, c, t, g, unknown or other
  modified_base (115)..(117): a, c, t, g, unknown or other
  modified_base (122)..(122): a, c, t, g, unknown or other
  modified_base (126)..(126): a, c, t, g, unknown or other
  modified_base (159)..(159): a, c, t, g, unknown or other
  modified_base (161)..(161): a, c, t, g, unknown or other
ccctgcccgtcacccctggagagccggcctccatctcctgcaggtctagtcagaacctcctgcatagttctggatacacctatttgcattggtacctgcagaagcnanggcaccnnncaccngtcnccatgcccgtcacccctggagagccgtcctccntncctggcaggttcagtggcagtggatcaggcacagattttacactgaaaatcagcagagtggaggctgaggatgtcggggtttattactgcatgcaagctctacaaactcctcgaacgttcggccaagggaccaaggtggaaatcaaac

SEQ ID NO: 5799 - DNA, 337 bp, Artificial Sequence; identical to SEQ ID NO: 4052
  Description of Artificial Sequence: Synthetic polynucleotide
  modified_base (134)..(134): a, c, t, g, unknown or other
  modified_base (136)..(136): a, c, t, g, unknown or other
  modified_base (143)..(145): a, c, t, g, unknown or other
  modified_base (150)..(150): a, c, t, g, unknown or other
  modified_base (154)..(154): a, c, t, g, unknown or other
  modified_base (187)..(187): a, c, t, g, unknown or other
  modified_base (189)..(189): a, c, t, g, unknown or other

SEQ ID NO: 5800 - protein, 9 aa, Artificial Sequence
  Description of Artificial Sequence: Synthetic peptide
MQALQTPRT

SEQ ID NO: 5801 - DNA, 350 bp, Artificial Sequence
  Description of Artificial Sequence: Synthetic polynucleotide
gcagctggtgcagtctggggctgaggtgaagaagcctgggtcctcggtgaaggtctcctgcaaggcttctggaggcaccttcagcaactatgctgtcagctgggtgcgacaggtccctggacaagggcttgagtggatgggagagatcatccctatatttgctacaccaaattacgcacagaaattccggggcagactcacgattaccgcggacacatccacgagcacagcctacatggagctgagcagcctgagatctgaggacacggccttttattactgtgcgcgtgacggggggcaaggtagttttgactactggggccagggaaccctggtcaccgtctcctcag

SEQ ID NO: 5802 - DNA, 355 bp, Artificial Sequence; identical to SEQ ID NO: 4445
  Description of Artificial Sequence: Synthetic polynucleotide

SEQ ID NO: 5803 - protein, 11 aa, Artificial Sequence
  Description of Artificial Sequence: Synthetic peptide
ARDGGQGSFDY

SEQ ID NO: 5804 - DNA, 308 bp, Artificial Sequence
  Description of Artificial Sequence: Synthetic polynucleotide
cctgcccgtcacccctggagagccggcctccatctcctgcaggtctagtcagagcctcctgcatcgtagtggatacaattatttggattggtacctgcagaagccagggcagtctccacagctcctgatctatttgggttctaatcgggcctccggggtccctgacaggttcagtggcagtggatcaggcacagattttacactgaaaatcagcagagtggaggctgaggatgttggggtttattactgcatgcaagctctacaaactcccaggacgttcggccaagggaccaaggtggaaatcaaac

SEQ ID NO: 5805 - DNA, 337 bp, Artificial Sequence; identical to SEQ ID NO: 4448
  Description of Artificial Sequence: Synthetic polynucleotide

SEQ ID NO: 5806 - protein, 9 aa, Artificial Sequence
  Description of Artificial Sequence: Synthetic peptide
MQALQTPRT

SEQ ID NO: 5807 - DNA, 344 bp, Artificial Sequence
  Description of Artificial Sequence: Synthetic polynucleotide
ggtgcagtctggggctgaggtgaagaagcctgggtccacggtgaaggtctcctgcgaggcttctggaggcaccttcagtaactatgatatcagctgggtgcgacaggcccctggacaagggcttgagtggatgggagggatcatccctgtctttggtaccgcaaagtacgcacagaagttccagggcagagtcacgatcaccgcggacatatcgacgagcacagcctatatggagctgagcagcctaagatctgacgacacggccgtcttttactgtgcgagagatggcggaacagggagttatgactactggggccagggaacgctggtcaccgtctcctcag

SEQ ID NO: 5808 - DNA, 355 bp, Artificial Sequence
  Description of Artificial Sequence: Synthetic polynucleotide
caggtgcagctggtgcagtctggggctgaggtgaagaagcctgggtccacggtgaaggtctcctgcgaggcttctggaggcaccttcagtaactatgatatcagctgggtgcgacaggcccctggacaagggcttgagtggatgggagggatcatccctgtctttggtaccgcaaagtacgcacagaagttccagggcagagtcacgatcaccgcggacatatcgacgagcacagcctatatggagctgagcagcctaagatctgacgacacggccgtcttttactgtgcgagagatggcggaacagggagttatgactactggggccagggaacgctggtcaccgtctcctcag

SEQ ID NO: 5809 - protein, 11 aa, Artificial Sequence
  Description of Artificial Sequence: Synthetic peptide
ARDGGTGSYDY

SEQ ID NO: 5810 - DNA, 308 bp, Artificial Sequence
  Description of Artificial Sequence: Synthetic polynucleotide
cctgcccgtcacccctggagagccggcctccatctcctgcaggtctagtcagagcctcctccataggagtggagacaactatttggattggtacctgcagaagccagggcagtctccacaactcctgatctatttggcttcttatcgggcctccggggtccctgacaggttcagtggcagtggatcaggcacacattttacactgaagatcagcagagtggaggctgaggacgttggggtttattactgcatgcaagctctacaaactcctcggacgttcggccaagggaccaaggtagaaatcaaac

SEQ ID NO: 5811 - DNA, 337 bp, Artificial Sequence; identical to SEQ ID NO: 4658
  Description of Artificial Sequence: Synthetic polynucleotide

SEQ ID NO: 5812 - protein, 9 aa, Artificial Sequence
  Description of Artificial Sequence: Synthetic peptide
MQALQTPRT

SEQ ID NO: 5813 - DNA, 345 bp, Artificial Sequence
  Description of Artificial Sequence: Synthetic polynucleotide
tgcagctggtgcagtctggggctgaggtgaagagtcctgggtcctcggtgaaggtctcctgcaaggcttctggaggcaccttcagcaatcatcctatcagctgggtgcgacaggcccctggacaagggcttgagtggatgggagggatcatccctagctttggaacagcacactacgcacagaagttccagggcagagtcacgattaccgcggacgaacccacgagcacagcctacatggagctgagcagcctgagatcggatgacacggccgtttattattgtgcgaccggatacagttatggcgactactggggccagggaaccctggtcaccgtctcctcag

SEQ ID NO: 5814 - DNA, 349 bp, Artificial Sequence; identical to SEQ ID NO: 641
  Description of Artificial Sequence: Synthetic polynucleotide

SEQ ID NO: 5815 - protein, 9 aa, Artificial Sequence
  Description of Artificial Sequence: Synthetic peptide
ATGYSYGDY

SEQ ID NO: 5816 - DNA, 296 bp, Artificial Sequence
  Description of Artificial Sequence: Synthetic polynucleotide
cctgtctgcatctgtaggagacagagtcaccatcacttgccaggcgagtcaagacattaataggtatttaaattggtatcagcagaaaccagggaaagcccctaagctcctgatctacgatgcatccaatttggaaacaggggtcccatcgaggttcagtggaagtgcatctgggacagattttactttcaccatcagcagcctgcagcctgaagatattgcaacatattactgtcaacagtatgataatctccatgtagtcactttcggccctgggaccaaagtggatatcaaac

SEQ ID NO: 5817 - DNA, 325 bp, Artificial Sequence; identical to SEQ ID NO: 644
  Description of Artificial Sequence: Synthetic polynucleotide

SEQ ID NO: 5818 - protein, 10 aa, Artificial Sequence
  Description of Artificial Sequence: Synthetic peptide
QQYDNLHVVT

SEQ ID NO: 5819 - DNA, 355 bp, Artificial Sequence
  Description of Artificial Sequence: Synthetic polynucleotide
gtgcagctggtgcagtctggggctgaggtgaagaagcctgggtcctcggtgaaagtctcctgcaagacttctggaggcatcttcagcaactatgctatcaactgggtgcggcaggcccctgggccaggacttgagtggatgggaggaatcatccctctctttggtagagcaaagtatgcacagaagttccggggcagagtcacgatcaccgcggacgaatccacgagcacagcctacatggaactgagcagcctgacgtctgaggacacggccgtgtattactgtgcgagagacgggggggcagtggttggtttttgctactggggccagggaaccctgatcaccgtctcctcag

SEQ ID NO: 5820 - DNA, 358 bp, Artificial Sequence; identical to SEQ ID NO: 2369
  Description of Artificial Sequence: Synthetic polynucleotide

SEQ ID NO: 5821 - protein, 12 aa, Artificial Sequence
  Description of Artificial Sequence: Synthetic peptide
ARDGGAVVGFCY

SEQ ID NO: 5822 - DNA, 293 bp, Artificial Sequence
  Description of Artificial Sequence: Synthetic polynucleotide
cctgtctgcatctgtaggagacagagtcaccatcacttgccaggcgagtcaggacattagcaactatttgaattggtatcagcagaaaccagggaaagcccctaagctcctgatctacgatgcatccaatttggaaacgggggtcccatcaaggttcagtggaagtggatctgggacagattttactttcaccatcagcagcctgcagcctgaagatattgcaacatattactgtcaacagtatgataatctcatattcactttcggccctgggaccaaagtggatatcaaac

SEQ ID NO: 5823 - DNA, 322 bp, Artificial Sequence; identical to SEQ ID NO: 2372
  Description of Artificial Sequence: Synthetic polynucleotide

SEQ ID NO: 5824 - protein, 9 aa, Artificial Sequence
  Description of Artificial Sequence: Synthetic peptide
QQYDNLIFT

SEQ ID NO: 5825 - DNA, 444 bp, Artificial Sequence
  Description of Artificial Sequence: Synthetic polynucleotide
  modified_base (69)..(69): a, c, t, g, unknown or other
  modified_base (71)..(77): a, c, t, g, unknown or other
  modified_base (79)..(86): a, c, t, g, unknown or other
  modified_base (88)..(89): a, c, t, g, unknown or other
tggagtctgggggaggcgtggtccagcctgggaggtccctgagactctcctgtgcagcctctggatccncnnnnnnngnnnnnnnntnncaggtgcagctggtgcagtctggggctgaggtgaagaagcctgggtcctcggtgagggtctcctgcaaggcttctggaggcaccctcagcaactatgctatcaggtgggtgcgagaggcccctggacaagggcttgagtggatgggagggatcatccctgtctttagaacaacaaactacgcacagcagttccagggcagagtcacaattaccgcggacgaatccacgaacacagcctacatggaactgagcagcctgagatctgaggacacggccgtttattactgtgcgagagcttttgggggtcatgggggcgactactggggccagggaaccctggtcaccgtctcctcag

SEQ ID NO: 5826 - DNA, 355 bp, Artificial Sequence; identical to SEQ ID NO: 3221
  Description of Artificial Sequence: Synthetic polynucleotide

SEQ ID NO: 5827 - protein, 11 aa, Artificial Sequence
  Description of Artificial Sequence: Synthetic peptide
ARAFGGHGGDY

SEQ ID NO: 5828 - DNA, 296 bp, Artificial Sequence
  Description of Artificial Sequence: Synthetic polynucleotide
cctgtctgcatctgtaggagacagagtcaccatcagttgccaggcgagtcaggacattaagaactatttaaattggtatcagcacaaaccagggaaagcccctaaactcctgatcttcgatgcatccaatctggaaacaggggtcccatcaaggttcagtggaagtggatctgggacacattttactttcaccatcagcagcctgcagcctgaagatattgcaacatattactgtcaacaatatgataatctccctcgattcactttcggcccagggaccaaagtggatatcaaac

SEQ ID NO: 5829 - DNA, 325 bp, Artificial Sequence; identical to SEQ ID NO: 3224
  Description of Artificial Sequence: Synthetic polynucleotide

SEQ ID NO: 5830 - protein, 10 aa, Artificial Sequence
  Description of Artificial Sequence: Synthetic peptide
QQYDNLPRFT

SEQ ID NO: 5831 - DNA, 352 bp, Artificial Sequence
  Description of Artificial Sequence: Synthetic polynucleotide
gtgcagctggtgcagtctggggctgaggtgaagaagcctgggtcctcggtgaaggtctcctgcaaggcttctggaggcaccttcagcaactatgctatcaactgggtgcgacaggcccctggacaagggcttgagtggatgggagggatcatccctatctttggtacaacaaactacgcacagaagttccagggcagagtcacgattaccgcggacgaatccacgagcacagcctacatggaactgagcagcctgagatttgaggacacggccgtgtattactgtgcgagagcaatgggatctactgggggagactactggggccagggaaccctggtcaccgtctcctcag

SEQ ID NO: 5832 - DNA, 355 bp, Artificial Sequence; identical to SEQ ID NO: 3413
  Description of Artificial Sequence: Synthetic polynucleotide

SEQ ID NO: 5833 - protein, 11 aa, Artificial Sequence
  Description of Artificial Sequence: Synthetic peptide
ARAMGSTGGDY

SEQ ID NO: 5834 - DNA, 296 bp, Artificial Sequence
  Description of Artificial Sequence: Synthetic polynucleotide
cctgtctgcatctgtaggagacagagtcaccatcacttgccaggcgagtcaggacattagcaactatttaaattggtatcagcagaaaccagggaaagcccctaagctcctgatctacgatgcatccaatttggaaacaggggtcccatcaaggttcagtggaagtggatctgggacagattttactttcaccatcagcggcctgcagcctgaagatattgcaacatattactgtcagcaatatgattatctccctcggttcactttcggccctgggaccaaagtggatatcaaac

SEQ ID NO: 5835 - DNA, 325 bp, Artificial Sequence; identical to SEQ ID NO: 3416
  Description of Artificial Sequence: Synthetic polynucleotide

SEQ ID NO: 5836 - protein, 10 aa, Artificial Sequence
  Description of Artificial Sequence: Synthetic peptide
QQYDYLPRFT

SEQ ID NO: 5837 - DNA, 349 bp, Artificial Sequence
  Description of Artificial Sequence: Synthetic polynucleotide
cagctggtgcagtctggggctgaggtgaagaagcctgggtcctcggtgaaggtctcctgcaaggcttctggaggaggcaccttcagcaactatcctatcaactgggtgcgacaggcccctggacaaggccttgagtggatgggagggatcatccctttctttggcacaccaaactacgcacagaagttccagggcagactcacgattaccgcggacgaatccacgagcacagcctacatgcaactgagcagcctgagatctgacgacacggccatattttactgtgcgagaggagttagtggctggttcacgtactggggccagggaaccctgctcaccgtctcctcag

SEQ ID NO: 5838 - DNA, 355 bp, Artificial Sequence; identical to SEQ ID NO: 3017
  Description of Artificial Sequence: Synthetic polynucleotide

SEQ ID NO: 5839 - protein, 10 aa, Artificial Sequence
  Description of Artificial Sequence: Synthetic peptide
ARGVSGWFTY

SEQ ID NO: 5840 - DNA, 294 bp, Artificial Sequence
  Description of Artificial Sequence: Synthetic polynucleotide
ccctgtctgcctctataggagacagagtcaccatcacttgccaggcgagtcaggacattagcgactatttaaattggtatcagcacaaaccagggaaagcccctaagctcctgatctacgatgcggccaatttggaaacaggggtcccatcaaggttcagtggaagtggatctgggacacattttactttcaccatcagcagcctgcagcctgacgatgttgcaacatattactgtcaacagtatgataatctcgtcagcaccttcggccctgggaccaaagtggatatcaaac

SEQ ID NO: 5841 - DNA, 322 bp, Artificial Sequence; identical to SEQ ID NO: 3020
  Description of Artificial Sequence: Synthetic polynucleotide

SEQ ID NO: 5842 - protein, 9 aa, Artificial Sequence
  Description of Artificial Sequence: Synthetic peptide
QQYDNLVST

SEQ ID NO: 5843 - DNA, 352 bp, Artificial Sequence
  Description of Artificial Sequence: Synthetic polynucleotide
gtgcagctggtgcagtctggggctgaggtgaagaagcctgggtcctcggtgaaggtctcctgcaaggcttctggagccaccctcaccaactatgctgtcaggtgggtgcgacaggcccctggacaagggcttgagtggatgggagggatcatccctatctttcgtacgccacactacgcacagaagttccagggcagagtcacgattaccgcggacgaatccacgaacacagcctacttggagctgagcagcctgagatctgaagacacggccatgtattactgtgcgagatcttttgggggtcatgggggcgactactggggccagggaaccctggtcaccgtctcgtcag

SEQ ID NO: 5844 - DNA, 355 bp, Artificial Sequence; identical to SEQ ID NO: 3143
  Description of Artificial Sequence: Synthetic polynucleotide

SEQ ID NO: 5845 - protein, 11 aa, Artificial Sequence
  Description of Artificial Sequence: Synthetic peptide
ARSFGGHGGDY

SEQ ID NO: 5846 - DNA, 296 bp, Artificial Sequence
  Description of Artificial Sequence: Synthetic polynucleotide
cctgtctgcatctgtaggagacagagtcaccatcacttgccaggcgagtcaggacattaccaactatttaaattggtatcagctgaaaccagggaaagcccctaaactcctgatcttcgatgcatccaatttggaaacaggggtcccatcaaggttcagtggaagtggatcggggacactttttactttcagcatcagcggcctgcagcctgaagatattgcaacatattactgtcaacattatgataatctccctcgattcactttcggccctgggaccaaagtggatatcaaac

SEQ ID NO: 5847 - DNA, 325 bp, Artificial Sequence; identical to SEQ ID NO: 3146
  Description of Artificial Sequence: Synthetic polynucleotide

SEQ ID NO: 5848 - protein, 10 aa, Artificial Sequence
  Description of Artificial Sequence: Synthetic peptide
QHYDNLPRFT

SEQ ID NO: 5849 - DNA, 334 bp, Artificial Sequence
  Description of Artificial Sequence: Synthetic polynucleotide
tctggggctgaggtgaagaagcctgggtcctcggtgaaggtctcctgcaaggcttctggaggcaccttcagcaactattatttcaactgggtgcgacaggcccgtggacaaggacttgagtacatgggagggatcatccctatttttggcacaacacactacgcacagaagttccagggcagagtcacgattaccgcggacgaatctgcgagcacagtgtacatggagttgagcagcctgagatctgaggacacggccgtttattactgtgcgagagatgactctatggtgctcagcgactggggccagggaaccctggtcaccgtctcctcag

SEQ ID NO: 5850 - DNA, 352 bp, Artificial Sequence; identical to SEQ ID NO: 521
  Description of Artificial Sequence: Synthetic polynucleotide

SEQ ID NO: 5851 - protein, 10 aa, Artificial Sequence
  Description of Artificial Sequence: Synthetic peptide
ARDDSMVLSD

SEQ ID NO: 5852 - DNA, 292 bp, Artificial Sequence
  Description of Artificial Sequence: Synthetic polynucleotide
ctgtctgcttctgtaggagacagagtcaccatcacttgccgggcaagtcagggcattagaaatgatttaggctggtttcagcagaaaccggggaaagcccctaagtgcctgatctatgctgcatccggtttgcagaatggggtcccatcaaggttcagcggcagtggatctgggacagaattcactctcacaatcagcagcctgcagcctgaagattttgcaacttattactgtctacagcataatacttacccgctcaccttcggcggagggaccaaggtggagatcaaac

SEQ ID NO: 5853 - DNA, 322 bp, Artificial Sequence; identical to SEQ ID NO: 524
  Description of Artificial Sequence: Synthetic polynucleotide

SEQ ID NO: 5854 - protein, 9 aa, Artificial Sequence
  Description of Artificial Sequence: Synthetic peptide
LQHNTYPLT

SEQ ID NO: 5855 - DNA, 337 bp, Artificial Sequence
  Description of Artificial Sequence: Synthetic polynucleotide
cagtctggggctgaggtgaagaagcctgggtcttcggtgaaggtctcctgtaaggcttctggaggcaccttcagcaattattttttcagctgggtgcgacaggcccctggacaagggcttgagtggatgggagggatcatccctgtctttggtacaacacgctacgcacagaagttccagggcagagtcacgattaccgcggacgaatctacgagcacagcctacatggagctgagcagcctgagatctgaggacaccgccctatattactgtgcgagagatgactctatggtattaagcgactggggccagggaactctggtcaccgtctcctcag

SEQ ID NO: 5856 - DNA, 352 bp, Artificial Sequence; identical to SEQ ID NO: 161
  Description of Artificial Sequence: Synthetic polynucleotide

SEQ ID NO: 5857 - protein, 10 aa, Artificial Sequence
  Description of Artificial Sequence: Synthetic peptide
ARDDSMVLSD

SEQ ID NO: 5858 - DNA, 314 bp, Artificial Sequence
  Description of Artificial Sequence: Synthetic polynucleotide
  modified_base (14)..(14): a, c, t, g, unknown or other
  modified_base (16)..(18): a, c, t, g, unknown or other
  modified_base (20)..(20): a, c, t, g, unknown or other
gatgacccagtctncnnncnccctgtctgcatctgtaggagacagagtcaccatcacttgccgggcaagtcagggcattagaaatgatttaggctggtatcagcagaaaccagggcaaccccctaagcgcctgatctatgaagcatccactttactaagtggggtcccatcaaggttcagcggcagtggatctgggacagaattcactctcacaatcagcagcctgcagcctgaagattttgcgatttattattgtctacagcataatagttacccgctcactttcggcggagggaccaaggtggagatcaaac

SEQ ID NO: 5859 - DNA, 322 bp, Artificial Sequence; identical to SEQ ID NO: 554
  Description of Artificial Sequence: Synthetic polynucleotide
  modified_base (22)..(22): a, c, t, g, unknown or other
  modified_base (24)..(26): a, c, t, g, unknown or other
  modified_base (28)..(28): a, c, t, g, unknown or other

SEQ ID NO: 5860 - protein, 9 aa, Artificial Sequence
  Description of Artificial Sequence: Synthetic peptide
LQHNSYPLT

SEQ ID NO: 5861 - DNA, 338 bp, Artificial Sequence
  Description of Artificial Sequence: Synthetic polynucleotide
cagtctggggctgaggtgaggaagcctgggtcctcggtgaaggtctcctgcaagacttctggaggcgccttcagcaactatggtgtcaattgggtgcgacaggcccctggacaaggtcttgagtggatgggatatatcatccctgtctttgctacaccaagctacgcacagaagttccagggcagagtcaccattaccgcggacggatccacgtccacagcctacatggagctgagcggcctgagatctgaggacacggccatatattactgtgcgagagacgcgggagctaccatccttgattactggggccagggaaccctgatcaccgtctcctc

SEQ ID NO: 5862 - DNA, 353 bp, Artificial Sequence; identical to SEQ ID NO: 713
  Description of Artificial Sequence: Synthetic polynucleotide

SEQ ID NO: 5863 - protein, 11 aa, Artificial Sequence
  Description of Artificial Sequence: Synthetic peptide
ARDAGATILDY

SEQ ID NO: 5864 - DNA, 293 bp, Artificial Sequence
  Description of Artificial Sequence: Synthetic polynucleotide
cctgtctgcatctgtaggagacagagtcaccatcacttgccgggcaagtcagggcattagaaatgatttaggctggtatcagcagaaagcagggaaagcccctaagcgcctgatctatgctgcatccagtttggaaagtggggtcccatcaaggttcagcggcagtggatctgggacagaattcactctcacaatcagcagcctgcagcctgaagattttgcaacttattactgtctacagcataatcgttaccctctaactttcggcggagggaccaaggtggagatcaaac

SEQ ID NO: 5865 - DNA, 322 bp, Artificial Sequence; identical to SEQ ID NO: 716
  Description of Artificial Sequence: Synthetic polynucleotide

SEQ ID NO: 5866 - protein, 9 aa, Artificial Sequence
  Description of Artificial Sequence: Synthetic peptide
LQHNRYPLT

SEQ ID NO: 5867 - DNA, 333 bp, Artificial Sequence
  Description of Artificial Sequence: Synthetic polynucleotide
ctggggctgaggtgaagaagcctgggtcctcggtgaaggtctcctgcaaggcttctggaggcaccttcagcaactttgctatcaactgggtgcgacaggcccctggacaagggcttgagtggatgggagggatcatcccggtctttggaacaccaaactacgcaccgaggctccagggcagactcacgattaccgcggacgaatccacgagcacagcctacatggagctgagtagcctcagatctgaggactcggccgtgtattattgtgcgagagatacggctatggttttggactactggggccagggaaccctggtcaccgtctcctcag

SEQ ID NO: 5868 - DNA, 352 bp, Artificial Sequence; identical to SEQ ID NO: 163
  Description of Artificial Sequence: Synthetic polynucleotide

SEQ ID NO: 5869 - protein, 10 aa, Artificial Sequence
  Description of Artificial Sequence: Synthetic peptide
ARDTAMVLDY

SEQ ID NO: 5870 - DNA, 293 bp, Artificial Sequence
  Description of Artificial Sequence: Synthetic polynucleotide
cctgtctgcatctgtaggagacagagtcaccatcacttgccgggcaagtcagggcattagaaatgatttagcctggtatcagcagaagccagggaaagcccctaagcgcctgatctctgctgcatccattttggaaagtggggtcccatcaaggttcagcggcagtggatctgggacagagttcactctcacaatcagcagcctgcagcctgacgattttgcaagttattactgtctacagcataaaagttacccgctcactttcggaggagggaccaaggtggagatcaaac

SEQ ID NO: 5871 - DNA, 322 bp, Artificial Sequence; identical to SEQ ID NO: 1622
  Description of Artificial Sequence: Synthetic polynucleotide

SEQ ID NO: 5872 - protein, 9 aa, Artificial Sequence
  Description of Artificial Sequence: Synthetic peptide
LQHKSYPLT

SEQ ID NO: 5873 - DNA, 349 bp, Artificial Sequence
  Description of Artificial Sequence: Synthetic polynucleotide
gtgcagctggtgcagtctggggctgaggtgaagaagcctgggtcctcggttaaggtctcctgcaagacttctggaggcaccttcagcaactatgctatcaactgggtgcgacaggcccctggacaagggcttgagtggatgggacagatcatccctgtctttggtacaccaaactacgcacagaagttccagggcaggctcacgattaccgcggacgaatccaccagcacaggctacatggaattgagtagcctgagatctgaggacacggccgtctattattgtgcgagagatggaagtggtcactttgactattggggccagggaaccctggtcagcgtctcctcag

SEQ ID NO: 5874 - DNA, 352 bp, Artificial Sequence; identical to SEQ ID NO: 1235
  Description of Artificial Sequence: Synthetic polynucleotide

SEQ ID NO: 5875 - protein, 10 aa, Artificial Sequence
  Description of Artificial Sequence: Synthetic peptide
ARDGSGHFDY

SEQ ID NO: 5876 - DNA, 294 bp, Artificial Sequence
  Description of Artificial Sequence: Synthetic polynucleotide
ccctgtctgcatctttaggagacagagtcatcatcacttgccgggcaagtcagggcattagaaatcaattaggctggtatcagcagaaaccagggaaagcccctgagcgcctgatctatgaagcatcctttttggaaactggggtcccatcaaggttcagcggcagtggatctgggacagaattcactctcacaatcagcagcctggagcctgaagattttgcaacttattattgtctgcagcataaaagttaccctctcaccttcggcggagggaccaaggtggagatcaaac

SEQ ID NO: 5877 - DNA, 322 bp, Artificial Sequence; identical to SEQ ID NO: 1238
  Description of Artificial Sequence: Synthetic polynucleotide

SEQ ID NO: 5878 - protein, 9 aa, Artificial Sequence
  Description of Artificial Sequence: Synthetic peptide
LQHKSYPLT

SEQ ID NO: 5879 - DNA, 340 bp, Artificial Sequence
  Description of Artificial Sequence: Synthetic polynucleotide
tctggggctgaggtgaagaagcctgggtcctcggtgaaggtctcctgtaaggcttctggaggcaccttcagcaactttgctatcagctgggtgcgacaggcccctggacagggacttgagtggatgggagggatcatccctttctttggtacaccaaactatgcacagaagttccagggcagagtcacagttaccgcggacgaatccacgaccacggcctacatggaattgagaagactgacatctgaggacacggccgtttattactgtgcgagagaggggggagtagcagccgaatttgagttctggggccagggaaccctggtcaccgtgtcctcag

SEQ ID NO: 5880 - DNA, 358 bp, Artificial Sequence; identical to SEQ ID NO: 407
  Description of Artificial Sequence: Synthetic polynucleotide

SEQ ID NO: 5881 - protein, 12 aa, Artificial Sequence
  Description of Artificial Sequence: Synthetic peptide
AREGGVAAEFEF

SEQ ID NO: 5882 - DNA, 293 bp, Artificial Sequence
  Description of Artificial Sequence: Synthetic polynucleotide
cctgtctgcatctgtaggagacagagtcgccatcacttgccgggcaagtcagaccatcactacttatttacagtggtatcagcaggaaccagggaaagcccctaagctcctgatctatgctgcatccactttgcaaagtggcgtcccatcaaggttcagtggcagtggatctgggacagatttcactctcactatcagcagtctgcaacctgaagactttgcaacttactactgtcaacagagttacagttaccctcggacgttcggccaagggaccaaggtggaaatcaaac

SEQ ID NO: 5883 - DNA, 322 bp, Artificial Sequence; identical to SEQ ID NO: 410
  Description of Artificial Sequence: Synthetic polynucleotide

SEQ ID NO: 5884 - protein, 9 aa, Artificial Sequence
  Description of Artificial Sequence: Synthetic peptide
QQSYSYPRT

SEQ ID NO: 5885 - DNA, 351 bp, Artificial Sequence
  Description of Artificial Sequence: Synthetic polynucleotide
tgcagctggtgcagtctggggctgaggtgaagaagcctgggtcctcggtgaaggtctcctgcaaggcttctggaggcaccttcagtcattttgctatcagctggatacgacaggcccctggacaagggcttgagtggatgggagggatcatccccatctttggcacaggaaactacgcacagaagttcaagggcagagtcaccattaccgcggacgaatccacgagcacagtctacctggagctgagcagcctgagatatgaagacacggccgtttattactgtgcgagagatgactctagcgggagttacggctactggggccagggaaccctggtcaccgtctcttcag

SEQ ID NO: 5886 - DNA, 355 bp, Artificial Sequence; identical to SEQ ID NO: 731
  Description of Artificial Sequence: Synthetic polynucleotide

SEQ ID NO: 5887 - protein, 11 aa, Artificial Sequence
  Description of Artificial Sequence: Synthetic peptide
ARDDSSGSYGY

SEQ ID NO: 5888 - DNA, 294 bp, Artificial Sequence
  Description of Artificial Sequence: Synthetic polynucleotide
ccctgtctgcatctgtaggagacagagtcaccatcacttgccgggcaagtcagagcattagcagctatttaaattggtatcagcagaaaccagggaaagcccctaagctcctgatctatgctgcatccagtttgcaaagtggggtcccatcaaggttcagtggcagtggatctgggacagatttcactctcaccatcagcagtctgcaacctgaagattttgcaacttactactgtcaacagagttacagtacccctcgaacgttcggccaagggaccaaggtggaaatcaaac

SEQ ID NO: 5889 - DNA, 322 bp, Artificial Sequence; identical to SEQ ID NO: 734
  Description of Artificial Sequence: Synthetic polynucleotide

SEQ ID NO: 5890 - protein, 9 aa, Artificial Sequence
  Description of Artificial Sequence: Synthetic peptide
QQSYSTPRT

SEQ ID NO: 5891 - DNA, 343 bp, Artificial Sequence
  Description of Artificial Sequence: Synthetic polynucleotide
cagtctggggctgcggtgaagaagcctgggtcctccgtgaaggtctcctgcaagtcttctggaggcaccttcagcaattatgctattaactgggtgcgacaggcccctggacaagggcttgagtggatgggagggatcatccctgtgtttggcacagcagactacgctcagaagttcaagggcagagtctcgattaccgcggacgaatccacggaaacagcctacatggaactgagtggcctgagatctgacgacacggccgtattttactgtgcgcgagacgggggtagtgtggcagcagagactacatggggccagggaaccctggtcaccgtctcctcag

SEQ ID NO: 5892 - DNA, 358 bp, Artificial Sequence; identical to SEQ ID NO: 773
  Description of Artificial Sequence: Synthetic polynucleotide

SEQ ID NO: 5893 - protein, 12 aa, Artificial Sequence
  Description of Artificial Sequence: Synthetic peptide
ARDGGSVAAETT

SEQ ID NO: 5894 - DNA, 292 bp, Artificial Sequence
  Description of Artificial Sequence: Synthetic polynucleotide
cctgtctgcatctgtaggagacagagtcaccatcacttgccgggcaagtcagagcattagcagctatttaaattggtatcagcagaagccagggaaagcccctgagctcctgatctatgaaacatccaatttggaaagtggggtcccatcaaggttcagtggcggtggatctgggacagagttcactctcaccatcaggagtctacagcctgaagattttgcgacttattactgtcaacagagttacaggacccctcgggcgttcggccaagggaccaaggtggaagtcaaa

SEQ ID NO: 5895 - DNA, 321 bp, Artificial Sequence; identical to SEQ ID NO: 776
  Description of Artificial Sequence: Synthetic polynucleotide

SEQ ID NO: 5896 - protein, 9 aa, Artificial Sequence
  Description of Artificial Sequence: Synthetic peptide
QQSYRTPRA

SEQ ID NO: 5897 - DNA, 354 bp, Artificial Sequence
  Description of Artificial Sequence: Synthetic polynucleotide
tgcagctggtgcagtctggggctgaggtgaagaagcctgggtcctcggtgaaggtctcctgcaaggcttctggaggcaccttcaacacctttgctatcaattgggtgcgacaggcccctggacaaggacttgagtggatgggagggctcatccctgtctttggtacaccaaactacgcacagaagttccagggcagagtcaccattaccgcggacgaatctacgagcacagcctacatggagttgagcagcctgagatctgaggacacggccatgtatttctgtgcgagagatgggggggggatagcagcagaggactactggggccagggaaccctggtcaccgtctcctcag

SEQ ID NO: 5898 - DNA, 358 bp, Artificial Sequence; identical to SEQ ID NO: 875
  Description of Artificial Sequence: Synthetic polynucleotide

SEQ ID NO: 5899 - protein, 12 aa, Artificial Sequence
  Description of Artificial Sequence: Synthetic peptide
ARDGGGIAAEDY

SEQ ID NO: 5900 - DNA, 293 bp, Artificial Sequence
  Description of Artificial Sequence: Synthetic polynucleotide
cctgtctgcatctgtaggagacagagtcaccatcacttgccgggcaagtcagaccattagcacctatttaaattggtaccagcaaaaaccagggagagcccctaagctcctgatctttgaaacatacaatttgcaaactggggtcccatcaaggttcgctggcagtggatcggggacagatttcactctcaccatcagcagtctgcaacctgaagattttgcaacttactactgtcaacagagttataggacccctcggacgttcggccaagggaccaaggtggatatcaaac

SEQ ID NO: 5901 - DNA, 322 bp, Artificial Sequence; identical to SEQ ID NO: 878
  Description of Artificial Sequence: Synthetic polynucleotide

SEQ ID NO: 5902 - protein, 9 aa, Artificial Sequence
  Description of Artificial Sequence: Synthetic peptide
QQSYRTPRT

SEQ ID NO: 5903 - DNA, 352 bp, Artificial Sequence
  Description of Artificial Sequence: Synthetic polynucleotide
gtgcagctggtgcagtctggggctgaggtgaagaagcctgggtcctcggtgaagatctcctgcaagtcctctgggggcaccttcagtaactttgctatcaattgggtgcgacaggcccctggacaagggcttgagtggatgggagggatcatccctgtctttggtacagcacagtacgcacagaagttccagggcagagtcacgattaccgcggacgaatccacaagtacagtctacttggaggtgcgcagtctgcgatctgacgacacggccctacatttctgtgcgagagaggacggggtggcttcttttgactcctggggccagggaaccctggtcaccgtctcctcag

SEQ ID NO: 5904 - DNA, 355 bp, Artificial Sequence; identical to SEQ ID NO: 2543
  Description of Artificial Sequence: Synthetic polynucleotide

SEQ ID NO: 5905 - protein, 11 aa, Artificial Sequence
  Description of Artificial Sequence: Synthetic peptide
AREDGVASFDS

SEQ ID NO: 5906 - DNA, 292 bp, Artificial Sequence
  Description of Artificial Sequence: Synthetic polynucleotide
ctgtctgcatctgtaggagacagagtcaccatcgcttgccgggcaagtcagagcattagcagttatttaaattggtatcagcagaaaccagggaaagcccctaaactcctgatctatgctgcatccagtttgcaaagtggggtcccatcaaggttcagtggcagtggatctggggcagatttcactctcaccatcagcagtctgcagcctgaagattctgcgacttactactgtcaacagagttacagaacccctaagacgttcggccaagggaccaaggtggaaatcgaac

SEQ ID NO: 5907 - DNA, 322 bp, Artificial Sequence; identical to SEQ ID NO: 2546
  Description of Artificial Sequence: Synthetic polynucleotide

SEQ ID NO: 5908 - protein, 9 aa, Artificial Sequence
  Description of Artificial Sequence: Synthetic peptide
QQSYRTPKT

SEQ ID NO: 5909 - DNA, 346 bp, Artificial Sequence
  Description of Artificial Sequence: Synthetic polynucleotide
gtgcagctggtgcagtctgggactgaggtgaagaagcctgggtcctcggtgaaggtctcctgcaagacttctggaggcaccttcagcaactatgcaatctactgggtgcgacaggcccctggacaaggacttgagtggatgggagggatcatccctttctttggttcaccaaactacgcacagaggtttcagggcagagtcacgattactgcggacgcgtccacgagcacagcctacatggaactgagtaccctgagatctgacgacacggccatctattactgtgcgagaggtgtctggggctatgactactggggccagggaaccctggtcaccgtctcctcag

SEQ ID NO: 5910 - DNA, 349 bp, Artificial Sequence; identical to SEQ ID NO: 1325
  Description of Artificial Sequence: Synthetic polynucleotide

SEQ ID NO: 5911 - protein, 9 aa, Artificial Sequence
  Description of Artificial Sequence: Synthetic peptide
ARGVWGYDY

SEQ ID NO: 5912 - DNA, 315 bp, Artificial Sequence
  Description of Artificial Sequence: Synthetic polynucleotide
  modified_base (8)..(13): a, c, t, g, unknown or other
  modified_base (15)..(15): a, c, t, g, unknown or other
  modified_base (18)..(18): a, c, t, g, unknown or other
atgacccnnnnnntncantctccctgtctttgtctccaggggaaagagccaccctctcctgcagggccagtcagagtgttagcagcgactacttagcctggtaccagcagaaacctggccaggctcccaggcttttcatctatggtgcatccaccagggccactggcatcccagacaggttcagtggcagtgggtctgggacagacttcactctcaccatcagcagactggagcctgaagattttgcagtgtattactgtcaccactatgggaactcacaggcgttcggccaagggaccaaggtggaaatcaaac

SEQ ID NO: 5913 - DNA, 322 bp, Artificial Sequence; identical to SEQ ID NO: 1328
  Description of Artificial Sequence: Synthetic polynucleotide

SEQ ID NO: 5914 - protein, 8 aa, Artificial Sequence
  Description of Artificial Sequence: Synthetic peptide
HHYGNSQA

SEQ ID NO: 5915 - DNA, 346 bp, Artificial Sequence
  Description of Artificial Sequence: Synthetic polynucleotide
gtgcagctggtgcagtctggggctgaggtgaagaagcctgggtcctcggtgaaggtctcctgcaaggcttctggaggcaccttcagcaattatgagatcacctgggtgcgacaggcccctggacaagggcttgagtggatgggagggatcatccctgtctttggaacaccaaactacgcacagaaattccaggtcagagtcaaaattaccgcggacgaatccacgaccacagcctacatggagctgagcagactgagatctgaagacacggccgtatattactgtgcgagaggggtctggggtttggactactggggccagggaaccctggtcaccgtctcctcag

SEQ ID NO: 5916 - DNA, 349 bp, Artificial Sequence; identical to SEQ ID NO: 1163
  Description of Artificial Sequence: Synthetic polynucleotide

SEQ ID NO: 5917 - protein, 9 aa, Artificial Sequence
  Description of Artificial Sequence: Synthetic peptide
ARGVWGLDY

SEQ ID NO: 5918 - DNA, 295 bp, Artificial Sequence
  Description of Artificial Sequence: Synthetic polynucleotide
ctgtctttgtctccaggcgaaagagccaccctctcctgcagggccagtcagagtgttaacagcgactacttaacctggtaccagcagaaacctggccaggctcccaggctcctcatctatggtacatccaccagggccactggcatcccagacagattcagtggcagtgggtctgggacagacttcactctcaccatcagtagactggagcctgaagattttgcagtttattactgtcagcagtttggtaactcaccaatgacgttcggccaagggaccaaggtggaaatcaaac

SEQ ID NO: 5919 - DNA, 325 bp, Artificial Sequence; identical to SEQ ID NO: 1166
  Description of Artificial Sequence: Synthetic polynucleotide

SEQ ID NO: 5920 - protein, 9 aa, Artificial Sequence
  Description of Artificial Sequence: Synthetic peptide
QQFGNSPMT

SEQ ID NO: 5921 - DNA, 346 bp, Artificial Sequence
  Description of Artificial Sequence: Synthetic polynucleotide
gtgcagctggtgcagtctggggctgaggtgaagaagcctgggtcctcggtgaaggtctcctgcaaggcttctggaggcaccttcagcaactatcctatcacctgggtgcgacaggcccctggacaagggcttgagtggatgggagagatcatgcctgtctttggtacaccaatctacgcacagaagttccagggcacagtcacgattaccgcggaccaatcaacgagcacagcctacttggaggtgaccagtctgagatatgaggacacggccgtgtattactgtgcgagaggtgtttggggcttagattattggggccagggatccccggtcaccgtctcctcag

SEQ ID NO: 5922 - DNA, 349 bp, Artificial Sequence; identical to SEQ ID NO: 2591
  Description of Artificial Sequence: Synthetic polynucleotide

SEQ ID NO: 5923 - protein, 9 aa, Artificial Sequence
  Description of Artificial Sequence: Synthetic peptide
ARGVWGLDY

SEQ ID NO: 5924 - DNA, 293 bp, Artificial Sequence
  Description of Artificial Sequence: Synthetic polynucleotide
cctgtctttgtctccaggggaaagagccaccctctcctgcagggccagtcagagtattaacagcgactacttagcctggtatcagcttaaacctggccagactcccagactcctcatctatggagcatccagcagggccactggcatcccagacaggttcagtggcagtgggtctgggacagacttcactctcaccatcagcagactggagcctgaagattttgcagtgtattactgtcatcactatggtaattcacggacgttcggccaagggaccaaggtggaaatcaaac

SEQ ID NO: 5925 - DNA, 322 bp, Artificial Sequence; identical to SEQ ID NO: 2594
  Description of Artificial Sequence: Synthetic polynucleotide

SEQ ID NO: 5926 - protein, 8 aa, Artificial Sequence
  Description of Artificial Sequence: Synthetic peptide
HHYGNSRT

SEQ ID NO: 5927 - DNA, 346 bp, Artificial Sequence
  Description of Artificial Sequence: Synthetic polynucleotide
gtgcagctggtgcagtctggggctgaggtgcagaagcctgggtcctcggtgaaggtctcctgcacggcttctggaggcaccttcagcaactatggtatcaactgggtgcgacaggcccctggacaagggcttgagtggatgggagagatcatccccatctttggtacagcgaactacgcacagaagttccagggcagagtcaccattaccgcggacgaatccacgaccaccgcctacatggagctgagcagcctgacatctgaggacacggccgtgtattactgtgcgcgaggcgtgtgggggtatgactactggggccagggaaccctggtcaccgtctcctcag

SEQ ID NO: 5928 - DNA, 349 bp, Artificial Sequence; identical to SEQ ID NO: 3011
  Description of Artificial Sequence: Synthetic polynucleotide

SEQ ID NO: 5929 - protein, 9 aa, Artificial Sequence
  Description of Artificial Sequence: Synthetic peptide
ARGVWGYDY

SEQ ID NO: 5930 - DNA, 296 bp, Artificial Sequence
  Description of Artificial Sequence: Synthetic polynucleotide
cctgtctttgtctccaggggaaagagccaccctctcctgcagggccagtcagagtgttaacagcgactatttagcctggtatcagcagaaacctggccaggctcccaggctcctcatctatggtgcatccggcagggccactggcatcccagacaggttcagtggcagtgggtctgggacagacttcactctcaccatcagcagactggagcctgaagactttgcagtgtattactgtcagcactatggtagctcacctagaacgttcggccaagggaccaaggtggaaatcaaac

SEQ ID NO: 5931 - DNA, 325 bp, Artificial Sequence; identical to SEQ ID NO: 3014
  Description of Artificial Sequence: Synthetic polynucleotide

SEQ ID NO: 5932 - protein, 9 aa, Artificial Sequence
  Description of Artificial Sequence: Synthetic peptide
QHYGSSPRT

SEQ ID NO: 5933 - DNA, 346 bp, Artificial Sequence
  Description of Artificial Sequence: Synthetic polynucleotide
gtgcagctggtgcagtctggggctgaggtgaagaagcctgggtcctcggtgaaggtctcctgcaaggcatctggaggcaccttcagcaactatgctatcagttgggtgcgccaggcccctggacaagggcttgagtggatgggagatatcatccctatctttggcacaccaaactacgcacagaagtttcggggcagagtcatcattaccgcggacgaatccacgagaacagcctacatggagttgaacagcctgagatctgaggacacggccgtttattactgtgcgagaggtgtctggggatatgactactggggccagggaaccctggtcaccgtctcctcag

SEQ ID NO: 5934 - DNA, 349 bp, Artificial Sequence; identical to SEQ ID NO: 3701
  Description of Artificial Sequence: Synthetic polynucleotide

SEQ ID NO: 5935 - protein, 9 aa, Artificial Sequence
  Description of Artificial Sequence: Synthetic peptide
ARGVWGYDY

SEQ ID NO: 5936 - DNA, 293 bp, Artificial Sequence
  Description of Artificial Sequence: Synthetic polynucleotide
cctgtctttgtctccaggggaaagagccaccctctcctgcagggccagtcagagtcttgacagcgactacttagcctggtaccaacagaaacctggccaggctcccaggctcctcatctatggtgcatccaccagggccactggcatcccagacaggttcagtggcagtgggtctgcgacagacttcattctcaccatcagaagactggagcctgaagattttgcagtctattactgtcagcattatggtacctcaccgacgttcggccaagggaccaaggtggaaatcaaac

SEQ ID NO: 5937 - DNA, 322 bp, Artificial Sequence; identical to SEQ ID NO: 3704
  Description of Artificial Sequence: Synthetic polynucleotide

SEQ ID NO: 5938 - protein, 8 aa, Artificial Sequence
  Description of Artificial Sequence: Synthetic peptide
QHYGTSPT

SEQ ID NO: 5939 - DNA, 352 bp, Artificial Sequence
  Description of Artificial Sequence: Synthetic polynucleotide
gtgcagctggtgcagtctggggctgaggtgaagaagcctgggtcctcggtgaaggtctcctgcaaggcttctggaggcatcttcagcaattatggaatcagctgggtgcgacaggcccctggacaagggcttgagtggatgggagggatcatccctatctttggaacaccaaactacgcacagaagttccaggacagagtcaccattaccgcggacaaatccacgagcacggcctacctggagctgagcagcctgacatctgaggacacggccgtctattactgtgcgagagagttcggatctacggggggccaatactggggccagggaaccctggtcaccgtctcctcag

SEQ ID NO: 5940 - DNA, 355 bp, Artificial Sequence; identical to SEQ ID NO: 1487
  Description of Artificial Sequence: Synthetic polynucleotide

SEQ ID NO: 5941 - protein, 11 aa, Artificial Sequence
  Description of Artificial Sequence: Synthetic peptide
AREFGSTGGQY

SEQ ID NO: 5942 - DNA, 297 bp, Artificial Sequence
  Description of Artificial Sequence: Synthetic polynucleotide
ccctgtctgcatctgtaggagacagagtcaccatcacttgccaggcgagccaggacattagcagttatttaaactggtatcagcagaaaccagggaaaccccctaagctcctgatctacgatgcatccaatttggagacaggggtcccatcaaggttcagtggaagtggatctgggacagattttactttcaccatcagcagcctgcagcctgaagatgttgcaacatattactgtcaacagtataatggtctcccttcgcatacttacggccctgggaccaaagtggatatcaaac

SEQ ID NO: 5943 - DNA, 325 bp, Artificial Sequence; identical to SEQ ID NO: 1490
  Description of Artificial Sequence: Synthetic polynucleotide

SEQ ID NO: 5944 - protein, 10 aa, Artificial Sequence
  Description of Artificial Sequence: Synthetic peptide
QQYNGLPSHT

SEQ ID NO: 5945 - DNA, 352 bp, Artificial Sequence
  Description of Artificial Sequence: Synthetic polynucleotide
gtgcagctggtgcagtctggggctgaggtgaagaagcctgggtcctcggtgaaggtctcctgcaaggcttctggaggcattttcagcaactatgttatcaactgggtgcgacaggcccctggacaagggcttgagtggatgggaggcatcatccctatctttggtacaacaaactacgcacagaagtttcagggcagagtcacgattaccgcggacaaatccacgaacacagcctacatggaggtgagcagcctgagatctgaagacacggccgtgtattactgtgcgagagagtttggatctacggggggccaatactggggccagggaaccctggtcaccgtctcctcag

SEQ ID NO: 5946 - DNA, 355 bp, Artificial Sequence; identical to SEQ ID NO: 1661
  Description of Artificial Sequence: Synthetic polynucleotide

SEQ ID NO: 5947 - protein, 11 aa, Artificial Sequence
  Description of Artificial Sequence: Synthetic peptide
AREFGSTGGQY

SEQ ID NO: 5948 - DNA, 296 bp, Artificial Sequence
  Description of Artificial Sequence: Synthetic polynucleotide
cctgtctgcatctgtaggagacagagtcaccatcacttgccaggcgagtcaggacattagcaactatttaaattggtatcagcagaaaccagggaaagcccctaagctcctgatctacgatgcatccaatttggaaacaggggtcccatcaaggttcagtggaagtggatctgggacagattttactttcaccatcagcagcctgcaacctgaagatattgcaacatattactgtcaacagtatgataatctcccttcgcttactttcggccctgggaccacagtggatatcaaac

SEQ ID NO: 5949 - DNA, 325 bp, Artificial Sequence; identical to SEQ ID NO: 1664
  Description of Artificial Sequence: Synthetic polynucleotide

SEQ ID NO: 5950 - protein, 10 aa, Artificial Sequence
  Description of Artificial Sequence: Synthetic peptide
QQYDNLPSLT

SEQ ID NO: 5951 - DNA, 350 bp, Artificial Sequence
  Description of Artificial Sequence: Synthetic polynucleotide
gtgcagctggtgcagtctggggctgaggtgaagaagcctgggtccgcggtgagggtctcctgcaaggcttctggaggcatcttcagtcactatggtatcagctgggtgcgacaggtcccaggacaagggcttgagtggatgggagggatcattcctgcctttggtacaccaaattacgcacggaagttccagggcagactcacggttaccgcggacaaagccacgagcacagcctacatggacctgaggagtctgagatctgaggacacggccgtgtattactgtgcgagagagtacggatcaacggggggccaatactggggccagggaaccctggtcatcgtctcctc

SEQ ID NO: 5952 - DNA, 353 bp, Artificial Sequence; identical to SEQ ID NO: 1679
  Description of Artificial Sequence: Synthetic polynucleotide

SEQ ID NO: 5953 - protein, 11 aa, Artificial Sequence
  Description of Artificial Sequence: Synthetic peptide
AREYGSTGGQY

SEQ ID NO: 5954 - DNA, 297 bp, Artificial Sequence
  Description of Artificial Sequence: Synthetic polynucleotide
ccctgtctgcatctgtgggagacagagtcaccatcacttgccaggcgagtcaagacattaacacctatttaaattggtatcagcagaaaccagggaaaccccctaagctcctgatctacgatgcatccaatttggaaacaggggtcacatcgaggttcagtggaagtggatctgggacagattttactttcaccatcagcagcctgcagcctgaagatattgcaacatattactgtcaacaatatgatagtctcccttcgcatactttcggccctgggaccaaagtggatatcaaac

SEQ ID NO: 5955 - DNA, 325 bp, Artificial Sequence; identical to SEQ ID NO: 1682
  Description of Artificial Sequence: Synthetic polynucleotide

SEQ ID NO: 5956 - protein, 10 aa, Artificial Sequence
  Description of Artificial Sequence: Synthetic peptide
QQYDSLPSHT

SEQ ID NO: 5957 - DNA, 355 bp, Artificial Sequence
  Description of Artificial Sequence: Synthetic polynucleotide
gtgcagctggtgcagtctggggctgaagtgaagaagcctgggtcctcggtgaaggtctcctgcaaggcttctggaggcaccttcgccaactatgctttcagctgggtgcgacaggcccctggacaagggcttgtgtggatgggaggaatcatccctgtctttggtacacccaactacgcacagaagttccaaggcagagtcacgattaccgcggacacatccacgagcacagcctatatggaactgagcggcctgagatctgacgacacggccgtgtattactgtgcgagagacgggggagcagtggctgcttatgcctactggggccagggaaccctggtcaccgtctcctcag

SEQ ID NO: 5958 - DNA, 358 bp, Artificial Sequence; identical to SEQ ID NO: 1223
  Description of Artificial Sequence: Synthetic polynucleotide

SEQ ID NO: 5959 - protein, 12 aa, Artificial Sequence
  Description of Artificial Sequence: Synthetic peptide
ARDGGAVAAYAY

SEQ ID NO: 5960 - DNA, 317 bp, Artificial Sequence
  Description of Artificial Sequence: Synthetic polynucleotide
  modified_base (17)..(17): a, c, t, g, unknown or other
  modified_base (20)..(20): a, c, t, g, unknown or other
gatgacccagtctccantcnccctgtctgcatctgtaggagacagagtcaccatcacttgccaggcgagtcaagacattagtcactatttaaattggtatcaacagagaccagggaaagcccctaaactcctgatctacgatgcatccaatttggaaacaggggtcccatcaaggttcagtggaagtggatctgggacacattttactttcaccatcagcagcctgcagcctgaagatattgcaacatattactgtcaacaatataatagtctccctggatccactttcggccctgggaccaaagtggatgtcaaac

SEQ ID NO: 5961 - DNA, 325 bp, Artificial Sequence; identical to SEQ ID NO: 1226
  Description of Artificial Sequence: Synthetic polynucleotide
  modified_base (25)..(25): a, c, t, g, unknown or other
  modified_base (28)..(28): a, c, t, g, unknown or other

SEQ ID NO: 5962 - protein, 10 aa, Artificial Sequence
  Description of Artificial Sequence: Synthetic peptide
QQYNSLPGST

SEQ ID NO: 5963 - DNA, 349 bp, Artificial Sequence
  Description of Artificial Sequence: Synthetic polynucleotide
gtgcagctggtgcagtctggggctgaggtgaagaagcctgggtcctcggtgaaggtctcctgcaaggcatctggaggcaccttcagaaataatgctatcagctgggtgcgacaggcccctggacaagggctcgaatggatgggaggaatcatccctatctttaatacaccaaactacgcacagaggtttcagggcagagtcacgattaccgcggacatatccacgagcacagcctacatggaacttaacagcctgagatctgacgacacggccgtgtattactgtgcgagtggggcctacggaccatgggactactggggccagggaaccctggtcaccgtctcctcag

SEQ ID NO: 5964 - DNA, 352 bp, Artificial Sequence; identical to SEQ ID NO: 2495
  Description of Artificial Sequence: Synthetic polynucleotide

SEQ ID NO: 5965 - protein, 10 aa, Artificial Sequence
  Description of Artificial Sequence: Synthetic peptide
ASGAYGPWDY

SEQ ID NO: 5966 - DNA, 293 bp, Artificial Sequence
  Description of Artificial Sequence: Synthetic polynucleotide
cctgtctgcatctattggcgacagggtcaccatcacttgccaggcgagtcaggacattaaaaactatttaaattggtttcagcagaaaccagggaaagcccctaagctcctgatctacgatgcttccaatttggaaacaggggtcccatcaaggttcagtggaagtggatctgggacagattttactttcattatcagcagcctacagcctgaagatattgcaacatattactgtcaacattatggtaatctcttcggggttttcggccctgggaccaaagtggatatcaaac

SEQ ID NO: 5967 - DNA, 322 bp, Artificial Sequence; identical to SEQ ID NO: 2498
  Description of Artificial Sequence: Synthetic polynucleotide

SEQ ID NO: 5968 - protein, 9 aa, Artificial Sequence
  Description of Artificial Sequence: Synthetic peptide
QHYGNLFGV

SEQ ID NO: 5969 - DNA, 355 bp, Artificial Sequence
  Description of Artificial Sequence: Synthetic polynucleotide
gtgcagctggtgcagtctggggctgaggtgaagaagcctgggtcttcggtgaaggtctcctgcaagacttctggaggccccttcaacaactatcctatcaactgggtgcgacaggcccctggacaagggcttgagtggatgggacgaatcatccctacctttggtacagcaaactacgcacagaaattccagggcagagtcacgattaccgcggacaaatccacgagcacagcctacatggagctgaatagcctgagatctgcggacacggccgtgtattactgtgcgagagatggtgggactagtggttctcttgactactggggccagggaaccctggtcatcgtctcctcag

SEQ ID NO: 5970 - DNA, 358 bp, Artificial Sequence; identical to SEQ ID NO: 2717
  Description of Artificial Sequence: Synthetic polynucleotide

SEQ ID NO: 5971 - protein, 12 aa, Artificial Sequence
  Description of Artificial Sequence: Synthetic peptide
ARDGGTSGSLDY

SEQ ID NO: 5972 - DNA, 308 bp, Artificial Sequence
  Description of Artificial Sequence: Synthetic polynucleotide
cctgcccgtcacccctggagagccggcctccatctcctgcaggtctagtcagagcctcctgcatagtaatggatacaactatttggattggtacctgcagaagccagggcagtctccacagctcctgatctatttgggttctaatcgggcctccggggtccctgacaggttcagtggcagtggatcaggcacagattttacactgaaaatcagtagagtggaggctgaggatgttggggtttattactgcatgcaagctctacaaactccgctcactttcggcggagggaccaaggtggagatcaaac

SEQ ID NO: 5973 - DNA, 337 bp, Artificial Sequence; identical to SEQ ID NO: 2720
  Description of Artificial Sequence: Synthetic polynucleotide

SEQ ID NO: 5974 - protein, 9 aa, Artificial Sequence
  Description of Artificial Sequence: Synthetic peptide
MQALQTPLT

SEQ ID NO: 5975 - DNA, 355 bp, Artificial Sequence
  Description of Artificial Sequence: Synthetic polynucleotide
gtgcagctggtgcagtctggggctgaggtgaagaagcctgggtcctcggtgaaggtctcctgcaagacttctggaggcagcttcaacaactatgctgtcaactgggtgcgacaggcccctggacaagggcttgagtggatgggagggatcatccctacctttggtacagcagactacccacagaagttccagggcagagtcaccattaccgcggacaaatccacgagcaccgcctacatggaactgaacagcctgaaatatgaagacacggccatgtatttctgtgcgagggcgtcgggaggttcagggagccttgactactggggccagggatccctggtcaccgtctcctcag

SEQ ID NO: 5976 - DNA, 358 bp, Artificial Sequence; identical to SEQ ID NO: 2447
  Description of Artificial Sequence: Synthetic polynucleotide

SEQ ID NO: 5977 - protein, 12 aa, Artificial Sequence
  Description of Artificial Sequence: Synthetic peptide
ARASGGSGSLDY

SEQ ID NO: 5978 - DNA, 307 bp, Artificial Sequence
  Description of Artificial Sequence: Synthetic polynucleotide
ctgcccgtcacccctggagagccggcctccatctcctgcaggtctagtcagagcctccttcatagaaatggatataactatttggattggttcctgcagaagccagggaagcctccacaggtcctgatctatttgggttctaatcgggcctccggggtccctgacaggttcagtgccagtggatcaggcacagactttacactgaaaatcagcagagtggaggctgaagatgttggggtttattactgcatgcaagttctgcaatctccgctcactttcggcggagggaccaaggtggagatcaaac

SEQ ID NO: 5979 - DNA, 337 bp, Artificial Sequence; identical to SEQ ID NO: 2450
  Description of Artificial Sequence: Synthetic polynucleotide

SEQ ID NO: 5980 - protein, 9 aa, Artificial Sequence
  Description of Artificial Sequence: Synthetic peptide
MQVLQSPLT

SEQ ID NO: 5981 - DNA, 352 bp, Artificial Sequence
  Description of Artificial Sequence: Synthetic polynucleotide
gtgcagctggtgcagtctggggctgaggtgaagaagcctgggtccgcggtgaaggtctcctgcaaggtctctggaggcaccttcagtaattatgctataacttgggtgcgacaggcccctggacaagggcttgagtggatgggacggatcatccctgtctttgctacaccagactacgcacagaagttccggggcagattcacgattaccgcggacaaatccacgagtacagcctacatggaactgagaaacctaagatctgaggacacggccgtatactactgtgcgagagatggggggactgggagccttgactactggggccagggaaccctggtcaccgtctcctcag

SEQ ID NO: 5982 - DNA, 355 bp, Artificial Sequence; identical to SEQ ID NO: 4073
  Description of Artificial Sequence: Synthetic polynucleotide

SEQ ID NO: 5983 - protein, 11 aa, Artificial Sequence
  Description of Artificial Sequence: Synthetic peptide
ARDGGTGSLDY

SEQ ID NO: 5984 - DNA, 308 bp, Artificial Sequence
  Description of Artificial Sequence: Synthetic polynucleotide
cctgcccgtcacccctggcgagccggcctccatctcctgcaagtctagtcagagcctcctgcatagaactggagacaactatttggattggtaccggcagaagccagggcagtctccacagctcctgatctattggggttctaatcgggcctccggggtccctgagaggttcagtggcagtggatcaggcacagattttacactgaaaatcagcagagtggaggctgaggatgttggcatttattactgcatgcaagctctacaaactcctcttactttcggcggagggaccaaattggagatcaaac

SEQ ID NO: 5985 - DNA, 337 bp, Artificial Sequence; identical to SEQ ID NO: 4076
  Description of Artificial Sequence: Synthetic polynucleotide

SEQ ID NO: 5986 - protein, 9 aa, Artificial Sequence
  Description of Artificial Sequence: Synthetic peptide
MQALQTPLT

SEQ ID NO: 5987 - DNA, 345 bp, Artificial Sequence
  Description of Artificial Sequence: Synthetic polynucleotide
tggtgcagtctggggctgaggtgaagaagcctgggtcctcggtgaaggtctcctgtacggcttctggaggcaacttcaacaactatgctatcaactgggtgcgacaggcccctggacaagggcttgagtggatgggaaggatcatccctgtctttggtacaccaaactacgcacagaggctccagggcagagtcacgattaccgcggacaagtccacgaggacagcctttatggacctgagcagcctgacatctgacgacacggccgtatattattgtgcgcgagatgggggtctggggtcccttgattactggggccagggaactctggtcaccgtctcctcag

SEQ ID NO: 5988 - DNA, 355 bp, Artificial Sequence; identical to SEQ ID NO: 4169
  Description of Artificial Sequence: Synthetic polynucleotide

SEQ ID NO: 5989 - protein, 11 aa, Artificial Sequence
  Description of Artificial Sequence: Synthetic peptide
ARDGGLGSLDY

SEQ ID NO: 5990 - DNA, 308 bp, Artificial Sequence
  Description of Artificial Sequence: Synthetic polynucleotide
cctgcccgtcacccctggagagccggcctccatctcctgcaggtctagtcagagcctcctacacagagatggaaacaactatttggattggtacctgcagaagccagggcagtctccacgcctcctgatctatttgggttctaatcgggcctccggggtccctgacaggttcagtggcagtggatcaggcacagattttacactgaagatcaccagagtggaggctgaggatgttggggtttattactgcatgcaagctctacaatctcccctcgctttcggcggagggaccagggtggagatcaaac

SEQ ID NO: 5991 - DNA, 337 bp, Artificial Sequence; identical to SEQ ID NO: 4172
  Description of Artificial Sequence: Synthetic polynucleotide

SEQ ID NO: 5992 - protein, 9 aa, Artificial Sequence
  Description of Artificial Sequence: Synthetic peptide
MQALQSPLA

SEQ ID NO: 5993 - DNA, 352 bp, Artificial Sequence
  Description of Artificial Sequence: Synthetic polynucleotide
gtgcagctggtgcagtctggggctgaggtgaagaagcctgggtcctcggtgagggtctcctgcacggtttctggaggcaacttcaacaactatgctattacctgggtgcgtcaggcccctggacaagggcttgagtggatggcagagatcatccctatctttggtacaccaaaatacgcacagaagttccaggacagagtcacgattaccacggacacatccacgactacagcgtacatggacctgagcagcctgagatcggaggacacggccgtatattactgtgcgcgagatggaggtttggggagtcttcactactggggccagggaaccctggtctccgtctcctcag

SEQ ID NO: 5994 - DNA, 355 bp, Artificial Sequence; identical to SEQ ID NO: 3761
  Description of Artificial Sequence: Synthetic polynucleotide

SEQ ID NO: 5995 - protein, 11 aa, Artificial Sequence
  Description of Artificial Sequence: Synthetic peptide
ARDGGLGSLHY

SEQ ID NO: 5996 - DNA, 330 bp, Artificial Sequence
  Description of Artificial Sequence: Synthetic polynucleotide
  modified_base (4)..(7): a, c, t, g, unknown or other
  modified_base (13)..(14): a, c, t, g, unknown or other
  modified_base (17)..(18): a, c, t, g, unknown or other
tatnnnncccccnntcnntctccctgcccgtcacccctggagagccggcctccatctcctgcaggtctagtcagagcctcctgcatagagatggaaacacctacttggattggtacgtgcagaagccagggcgatctccacaactcctgatctatttggcttctaatcgggcctccggggtccctgacaggttcagtggcagtggatcaggcacagattttacactgaaaatcagccgagtggaggctgaggatgttggggtttattactgcatggaagctctacaaactcctcgggctttcggcggagggaccagggtggagatcaaac

SEQ ID NO: 5997 - DNA, 337 bp, Artificial Sequence; identical to SEQ ID NO: 3764
  Description of Artificial Sequence: Synthetic polynucleotide

SEQ ID NO: 5998 - protein, 9 aa, Artificial Sequence
  Description of Artificial Sequence: Synthetic peptide
MEALQTPRA

SEQ ID NO: 5999 - DNA, 322 bp, Artificial Sequence
  Description of Artificial Sequence: Synthetic polynucleotide
gctgaggtgaagaggcctggggcctcggtgaagatttcctgcaggacttctgggtacaccttctctcactatgccattcactgggtgcgccaggcccccggacaaaggcctgagtggatgggatgggtcgacggtggcaagggaaacacaaaatattcgcagaagttcgaggggagagtcacctttaccagggacacatccgcgaccacagcctacatggaattgaccagcctgagatatgaagacacgggtgtatattactgtgcgagggcaggctggttcgacccttggggccagggaaccctggtcaccgtctcctcag

SEQ ID NO: 6000 - DNA, 346 bp, Artificial Sequence; identical to SEQ ID NO: 659
  Description of Artificial Sequence: Synthetic polynucleotide

SEQ ID NO: 6001 - protein, 8 aa, Artificial Sequence
  Description of Artificial Sequence: Synthetic peptide
ARAGWFDP

SEQ ID NO: 6002 - DNA, 314 bp, Artificial Sequence
  Description of Artificial Sequence: Synthetic polynucleotide
gatgacccagtctccattctccctgtctgcatctgtaggagacagagtcaccatcacttgccaggcgagtcacgatattaggaattatttaaattggtatcaacaaaaaccagggaaagcccttatgctcctgatgtacgatgcatccgatttgaatacaggggtcccatcaaggttcagtggaagtggatctgggacagattttactctcaccatcagcagcctgcagagtgaagatgttgcaacatattactgtcaacagtatgataatctcgggtggacgttcggccaggggaccaaggtggaaatcaaac

SEQ ID NO: 6003 - DNA, 322 bp, Artificial Sequence; identical to SEQ ID NO: 662
  Description of Artificial Sequence: Synthetic polynucleotide

SEQ ID NO: 6004 - protein, 9 aa, Artificial Sequence
  Description of Artificial Sequence: Synthetic peptide
QQYDNLGWT

SEQ ID NO: 6005 - DNA, 340 bp, Artificial Sequence
  Description of Artificial Sequence: Synthetic polynucleotide
cagcttgtgcagtctggggctgaggtgaagaagcctggggcctcagtgaaggtttcctgcaagggttctggatacacattcgctgactttgctatacattgggtgcgccaggcccccggacaaagccttgagtggatgggatggatcatcactggcaatggtgacacaaaatattcacggaagttccagggcagagtcaccatcaccagggacagatccgcgagtacagcctacatggagctgagcggcctgagatctgaagacacggctgtgtatttctgtgtgagagggggctggttcgacccctggggccagggaaccctggtcaccgtctcctcag

SEQ ID NO: 6006 - DNA, 346 bp, Artificial Sequence; identical to SEQ ID NO: 4025
  Description of Artificial Sequence: Synthetic polynucleotide

SEQ ID NO: 6007 - protein, 8 aa, Artificial Sequence
  Description of Artificial Sequence: Synthetic peptide
VRGGWFDP

SEQ ID NO: 6008 - DNA, 292 bp, Artificial Sequence
  Description of Artificial Sequence: Synthetic polynucleotide
ctgtctgcatctgtaggagacagagttaccatcaaatgccaggcgagtcaggacataaggaactatttaaattggtatcaccagaaaccagggaaagcccctaaactcctgatctacgatgcatccattttgcaaacaggggtcccatcaaggttcagtggaagtggatctgggacagatttcactttcaccatcagcagcctgcagcctgaagatattggaacgtattactgtcaacagtatgataatttctcgtggacgttcggccaagggaccaaggtggaaatcaaac

SEQ ID NO: 6009 - DNA, 322 bp, Artificial Sequence; identical to SEQ ID NO: 4028
  Description of Artificial Sequence: Synthetic polynucleotide

SEQ ID NO: 6010 - protein, 9 aa, Artificial Sequence
  Description of Artificial Sequence: Synthetic peptide
QQYDNFSWT

SEQ ID NO: 6011 - DNA, 342 bp, Artificial Sequence
  Description of Artificial Sequence: Synthetic polynucleotide
tccagcttgtgcagtctggggctgaggtgaagaagcctggggcctcagtgaaggtttcctgcaaggcttctggatacaccttcactcactatgctgtccattgggtgcgccaggcccccggacaaaggcctgagtggatgggatggatcaacgctggcaatggaaacacaaaatattcacagaagttccagggcagagtcaccattaccaccgacacatccgcgagcacagcctacatgcaactgagcagcctgagatctgaagacacggctgtctattactgtgtgagagggggatggttcgcgccctggggccagggaaccctggtcaccgtctcctcag

SEQ ID NO: 6012 - DNA, 346 bp, Artificial Sequence; identical to SEQ ID NO: 4151
  Description of Artificial Sequence: Synthetic polynucleotide

SEQ ID NO: 6013 - protein, 8 aa, Artificial Sequence
  Description of Artificial Sequence: Synthetic peptide
VRGGWFAP

SEQ ID NO: 6014 - DNA, 293 bp, Artificial Sequence
  Description of Artificial Sequence: Synthetic polynucleotide
cctgtctgcttctgtaggagacagagtcaccatcacttgccaggcgagtcaggacattagcaaccgtttaaattggtttcagcagaaaccagggaaagcccctaaactcctgatctacgatgcatccactttggaaacagggaccccatcaaggttcagtggaagtggatctgggacagattttactttcaccatcagcagcctgcagcctgaagatattgcaacatattactgtcaactttatgatactctgtccgcgtggacgttcggccaagggaccaaggtggagatca

SEQ ID NO: 6015 - DNA, 322 bp, Artificial Sequence; identical to SEQ ID NO: 4154
  Description of Artificial Sequence: Synthetic polynucleotide

SEQ ID NO: 6016 - protein, 10 aa, Artificial Sequence
  Description of Artificial Sequence: Synthetic peptide
QLYDTLSAWT

SEQ ID NO: 6017 - DNA, 341 bp, Artificial Sequence
  Description of Artificial Sequence: Synthetic polynucleotide
ccagcttgtgcagtctggggctgaggtgaagaagcctggggcctcagtgaaggtttcctgcaaggcctctggatacaccttcagaaattatgctatccattgggtgcgccaggcccccggacaaaggcctgagtggatgggatggatcgacgctggcagttataagacaaaatattcacagaagttccagggcagactcaccattaccagggacatatccgcgagcacggcctacatggagctgagcagcctgagatctgaggacacggctatatatttctgtgcgagaggggggtggttcgacccctggggccagggaaccctggtcaccgtctcctcag

SEQ ID NO: 6018 - DNA, 346 bp, Artificial Sequence; identical to SEQ ID NO: 4163
  Description of Artificial Sequence: Synthetic polynucleotide

SEQ ID NO: 6019 - protein, 8 aa, Artificial Sequence
  Description of Artificial Sequence: Synthetic peptide
ARGGWFDP

SEQ ID NO: 6020 - DNA, 296 bp, Artificial Sequence
  Description of Artificial Sequence: Synthetic polynucleotide
cctgtctgcatctgtaggagacagagtcaccatcacttgccaggcgagtcacgacattagcaaccaattaaattggtttcagcagaaaccagggaaagcccctaagctcctgatcctggatgcatccaatttggaagcaggggtcccatcgaggttcagtggaagtggatctgggacacattttactttcaccatcagcagcctacagcctgaagattttgctacatattactgtcaacactatgatagtctctccacgtggacgttcggccaagggaccacggtggacctcaaac

SEQ ID NO: 6021 - DNA, 325 bp, Artificial Sequence; identical to SEQ ID NO: 4166
  Description of Artificial Sequence: Synthetic polynucleotide

SEQ ID NO: 6022 - protein, 10 aa, Artificial Sequence
  Description of Artificial Sequence: Synthetic peptide
QHYDSLSTWT

SEQ ID NO: 6023 - DNA, 343 bp, Artificial Sequence
  Description of Artificial Sequence: Synthetic polynucleotide
cagtctggggctgaggtgaggaagcctgggtcctcggtgaaggtctcctgcaagacttttggaggcaccttcggcaactatgctatcatctgggtgcgacaggcccctggacaagggcttgagtgcatgggagggatcatccctgtctttgggacaccaaactacgcagagaagttccagggcagagtcacgattaccgcggacgaatccacgagcacagcctacatggagctgagcagcctgacatctgaggacacgggcgtctatttttgtgcgagagactctggagcaacagccagctttgactactggggacagggaactctggtcaccgtctcctcag

SEQ ID NO: 6024 - DNA, 358 bp, Artificial Sequence; identical to SEQ ID NO: 785
  Description of Artificial Sequence: Synthetic polynucleotide

SEQ ID NO: 6025 - protein, 12 aa, Artificial Sequence
  Description of Artificial Sequence: Synthetic peptide
ARDSGATASFDY

SEQ ID NO: 6026 - DNA, 291 bp, Artificial Sequence
  Description of Artificial Sequence: Synthetic polynucleotide
cctgtctgcatctgtgggagacagagtcaccatcacttgccgggcaagtcagagcattagcacctatttaaattggtatcaacagaaaccagggaaagcccctaagctcctgatctattctgcatccggcttgcaaagtggggtcccatcaaggttcagtggcagtgggtctgggacagatttcactctcaccatcatcagtctggaacgtgaagattttgctaattactactgtcaacagagttacagggcccctcaaacttttggccaggggaccaagctggagatcaa

SEQ ID NO: 6027 - DNA, 320 bp, Artificial Sequence; identical to SEQ ID NO: 788
  Description of Artificial Sequence: Synthetic polynucleotide

SEQ ID NO: 6028 - protein, 9 aa, Artificial Sequence
  Description of Artificial Sequence: Synthetic peptide
QQSYRAPQT

SEQ ID NO: 6029 - DNA, 343 bp, Artificial Sequence
  Description of Artificial Sequence: Synthetic polynucleotide
tctgggactgaggtgaagaagcctgggtcctcggtgaagatctcctgcaaggcctctggaggcagcttcagcaactatgctttcaactgggtgcgacaggcccctggacaggggcttgagtggatgggaggggtcatccctttttttggtacaccaaacttcgcacagaagttccagggcagagtcacacttaccgcggacgaatccacgagcactgcctacatggagctgagccgcctgagatctgaggacacggccgtgtattactgtgcgagacccggcggccatcaaagttggggctttgactactggggccagggaaccctggtcaccgtctcctcag

SEQ ID NO: 6030 - DNA, 361 bp, Artificial Sequence; identical to SEQ ID NO: 857
  Description of Artificial Sequence: Synthetic polynucleotide

SEQ ID NO: 6031 - protein, 13 aa, Artificial Sequence
  Description of Artificial Sequence: Synthetic peptide
ARPGGHQSWGFDY

SEQ ID NO: 6032 - DNA, 290 bp, Artificial Sequence
  Description of Artificial Sequence: Synthetic polynucleotide
cctgtctgcttctgtaggagacaaagtcaccatcacttgccgggcgagtcagagcatcagcacctatttaaattggtatcagcagagaccagggaaagcccctaagctcctaatctatgctgcatccactttgcgaagtggggtcccatcacggttcagtggcagtggatctgggacagacttcactctctccatcaacagtctgcaacctgaagattttgcaacttattattgtcaacagagtgacagtgccccctacacttttggccaggggaccaagctggagatca

SEQ ID NO: 6033 - DNA, 319 bp, Artificial Sequence; identical to SEQ ID NO: 860
  Description of Artificial Sequence: Synthetic polynucleotide

SEQ ID NO: 6034 - protein, 9 aa, Artificial Sequence
  Description of Artificial Sequence: Synthetic peptide
QQSDSAPYT

SEQ ID NO: 6035 - DNA, 355 bp, Artificial Sequence
  Description of Artificial Sequence: Synthetic polynucleotide
gtgcagctggtgcagtctggggctgaggtgaagaagcctgggtcctcggtgaaggtctcctgcaaggcttctggaggcaccttcagcaactttctgatctcctgggtgcgacaggcccctggacaagggcttgagtggatgggagggatcatccctgtctttggtacagcaaactacgcacagaagttccagggcagagtcacgattaccgcggacgaatccacgagcacagcctacatggatctgagcagcctgaaagctgacgacacggccgtgtattactgtgcgagagattcaggagctactgcgtcctatgactactggggccagggaaccctggtcaccgtctcctcag

SEQ ID NO: 6036 - DNA, 358 bp, Artificial Sequence; identical to SEQ ID NO: 1319
  Description of Artificial Sequence: Synthetic polynucleotide

SEQ ID NO: 6037 - protein, 12 aa, Artificial Sequence
  Description of Artificial Sequence: Synthetic peptide
ARDSGATASYDY

SEQ ID NO: 6038 - DNA, 292 bp, Artificial Sequence
  Description of Artificial Sequence: Synthetic polynucleotide
ctgtctgcatctgtaggagacagagtcaccatcacttgccgggcaagtcagagcattagcacttatttaaattggtatcagcagaagtcagggaatgcccctaagctcctgatctatactgcatccaatttgcaaagtggggtcccgtcaagattcagtggcagtggatctgggacagatttcactctcaccatcagcagtctgcaacctgaagattttgcaacttactactgtcaacagagttacaggacccctcactcttttggccaggggaccaagctggagatcaaac

SEQ ID NO: 6039 - DNA, 322 bp, Artificial Sequence; identical to SEQ ID NO: 1322
  Description of Artificial Sequence: Synthetic polynucleotide

SEQ ID NO: 6040 - protein, 9 aa, Artificial Sequence
  Description of Artificial Sequence: Synthetic peptide
QQSYRTPHS

SEQ ID NO: 6041 - DNA, 352 bp, Artificial Sequence
  Description of Artificial Sequence: Synthetic polynucleotide
cagctggtgcagtctggggctgaggtgaagaagcctgggtcctcggtgaaggtctcctgcaagtcttctggaggcaccttcagcaactatgctatcaactgggtccgacaggcccctggacaggggcttgagtggatgggagggatcatccctctctttggtacaccaaactacgcacagaggttccagggcagactcacaattaccgcggacgaatccacgagcacagcctacatggaactgagcagtctgagatctgaggactcggccatctattactgtgcgagagatcaaggggccccccccgcatttgcctactggggccagggaaccctggtcatcgtctcctcag

SEQ ID NO: 6042 - DNA, 358 bp, Artificial Sequence; identical to SEQ ID NO: 3431
  Description of Artificial Sequence: Synthetic polynucleotide

SEQ ID NO: 6043 - protein, 12 aa, Artificial Sequence
  Description of Artificial Sequence: Synthetic peptide
ARDQGAPPAFAY

SEQ ID NO: 6044 - DNA, 293 bp, Artificial Sequence
  Description of Artificial Sequence: Synthetic polynucleotide
cctgtctgcatctgtaggggacagagtcagcatctcttgccgggcaagtcagagcattaacagctatttaaattggtatcagcagaaaccagggaaagcccctaagctcctgatctacgctgtgtccagtttggaaaatggggtcccatcaaggttcagtggcagtggatctgggacagatttcactctcaccatcagcagtctgcaacccgaagattttgcaacttactactgtcaacagaattacattatcccgtacacttttggccaggggaccaacctggagatcaaac

SEQ ID NO: 6045 - DNA, 322 bp, Artificial Sequence; identical to SEQ ID NO: 3434
  Description of Artificial Sequence: Synthetic polynucleotide

SEQ ID NO: 6046 - protein, 9 aa, Artificial Sequence
  Description of Artificial Sequence: Synthetic peptide
QQNYIIPYT

SEQ ID NO: 6047 - DNA, 346 bp, Artificial Sequence
  Description of Artificial Sequence: Synthetic polynucleotide
cagctggtgcagtctggggctgaggtgaagaagcctgggtcctcggtgaaggtctcctgcaaggcttctggaggcaccttcagcaactatgatatcatctgggtgcgacaggcccctggacaagggcttgagtggatgggagggatcatccctaagtttgcaacagcaaagtacgcaccgaagttccagggcagagtcacgattaccgcggacgagtctacgagcacagcctacatggagctgagcagcctgagatctgaggacacggccttgtattactgtgcgagatcgagtggctggtcttatgactactggggccagggaaccctggtcaccgtctcctcag

SEQ ID NO: 6048 - DNA, 352 bp, Artificial Sequence; identical to SEQ ID NO: 1475
  Description of Artificial Sequence: Synthetic polynucleotide

SEQ ID NO: 6049 - protein, 10 aa, Artificial Sequence
  Description of Artificial Sequence: Synthetic peptide
ARSSGWSYDY

SEQ ID NO: 6050 - DNA, 305 bp, Artificial Sequence
  Description of Artificial Sequence: Synthetic polynucleotide
cctgcccgtcacccctggagagccggcctccatctcctgcaggtctagtcagagcctcctccatagtcatggatacaactatttggattggtacctgcagaagccagggcagtctccacagctcctgatctatttgggttctaatcgggcctccggggtccctgacaggttcagtggcagtggatcaggcacagattttacactgaaaatcagcagagtggaggctgaggatgttggggtttattactgcatgcaagctctccaaaatatcactttcggccctgggaccaaagtggatatcaaac

SEQ ID NO: 6051 - DNA, 334 bp, Artificial Sequence; identical to SEQ ID NO: 1478
  Description of Artificial Sequence: Synthetic polynucleotide

SEQ ID NO: 6052 - protein, 8 aa, Artificial Sequence
  Description of Artificial Sequence: Synthetic peptide
MQALQNIT

SEQ ID NO: 6053 - DNA, 351 bp, Artificial Sequence
  Description of Artificial Sequence: Synthetic polynucleotide
tgcagctggtgcagtctggggctgaggtgaagaagcctgggtcctcggtgaaggtctcctgcaaggcttctggaggcaccttcagcaactatgccatcaactgggtgcgacaggcccctggacaagggcttgagtggatgggagggatcatccctgtttttggtacagcgaactacgcacagaagtttcagggcagagtcacgattagtgcggacgagtccacgagaacagcctacatggagttgattagactgagacctgaggacacggccgtgtattactgtgcgcgagatgggggcacggcgtcatttgactactggggccagggaacccttgtcaccgtctcctcag

SEQ ID NO: 6054 - DNA, 355 bp, Artificial Sequence; identical to SEQ ID NO: 2519
  Description of Artificial Sequence: Synthetic polynucleotide

SEQ ID NO: 6055 - protein, 11 aa, Artificial Sequence
  Description of Artificial Sequence: Synthetic peptide
ARDGGTASFDY

SEQ ID NO: 6056 - DNA, 305 bp, Artificial Sequence
  Description of Artificial Sequence: Synthetic polynucleotide
cctgcccgtcagccctggagagccggcctccatctcctgtaggtctagtcagagcctcctgcatcgtgatggtcacaactatttggattggtatttgcagaagccagggcagtctccacagctcctgatctattggggttctaatcgggcctccggggtccctgacaggttcagtggcagtggatcaggcacagattttacactgaaaatcagcagagtggaggctgaagatgttggggtttattactgcatgcaagctctacaaaccttcactttcggccctgggaccaaagtggatatcaaac

SEQ ID NO: 6057 - DNA, 334 bp, Artificial Sequence; identical to SEQ ID NO: 2522
  Description of Artificial Sequence: Synthetic polynucleotide

SEQ ID NO: 6058 - protein, 8 aa, Artificial Sequence
  Description of Artificial Sequence: Synthetic peptide
MQALQTFT

SEQ ID NO: 6059 - DNA, 340 bp, Artificial Sequence
  Description of Artificial Sequence: Synthetic polynucleotide
cagtctggggccgaggtgaagaggcctgggtcctcggtgaaggtctcctgcaaggcttctggaggcaccttcagcaactatgctatcagctgggtgcgacaggcccctggacaagggcttgagtatatgggaggaatcatccctttctttggtacaccaaactacgcacagaagttccagggcagagtcacgattaccgcggacgaatccacgagcacagtctacatggacctgagcagcctgagatctcatgacacggccgtgtattactgcgcgagagacagcggggtggtggttatggactactggggccagggaaccctggtcaccgtctcctcag

SEQ ID NO: 6060 - DNA, 355 bp, Artificial Sequence; identical to SEQ ID NO: 2435
  Description of Artificial Sequence: Synthetic polynucleotide

SEQ ID NO: 6061 - protein, 11 aa, Artificial Sequence
  Description of Artificial Sequence: Synthetic peptide
ARDSGVVVMDY

SEQ ID NO: 6062 - DNA, 306 bp, Artificial Sequence
  Description of Artificial Sequence: Synthetic polynucleotide
tgcccgtcacccctggagagccggcctccatctcctgcaggtctcgtcagagcctcctgcatagtgatggatacaactatttgaattggtacctgcagaagccagggcagtctccacagctcctgatctatttgggttctaatcgggcctccggggtccctgacaggttcagtggcagtggatcaggcacagattttacactgaaaatcagcagagtggaggctgaggatgttggggtttattactgcatgcaagctctgcgaactccattcactttcggccctgggaccaaagtggatatcaaac

SEQ ID NO: 6063 - DNA, 337 bp, Artificial Sequence; identical to SEQ ID NO: 2438
  Description of Artificial Sequence: Synthetic polynucleotide

SEQ ID NO: 6064 - protein, 9 aa, Artificial Sequence
  Description of Artificial Sequence: Synthetic peptide
MQALRTPFT

SEQ ID NO: 6065 - DNA, 349 bp, Artificial Sequence
  Description of Artificial Sequence: Synthetic polynucleotide
  modified_base (271)..(271): a, c, t, g, unknown or other
cagctggtgcagtctggggctgaggtgaagaagcctgggtcctcggtgaaggtctcctgcaaggcttctggaggaaccttcagcaactatgctatcaactgggtgcgacaggcccctggacaagggcttgagtggatgggagggatcatccctttgtttggtacaccgaagtacgcacagaagttccagggcagagtcacgattagcgcggacgattccacgagtacggcctacatggagatgagcagtctgagatctgaggacacggccntctattattgtgcgagagatggggggatggcttcccttgactattggggccagggaaccctggtcgccgtctcctcag

SEQ ID NO: 6066 - DNA, 355 bp, Artificial Sequence; identical to SEQ ID NO: 3449
  Description of Artificial Sequence: Synthetic polynucleotide
  modified_base (277)..(277): a, c, t, g, unknown or other

SEQ ID NO: 6067 - protein, 11 aa, Artificial Sequence
  Description of Artificial Sequence: Synthetic peptide
ARDGGMASLDY

SEQ ID NO: 6068 - DNA, 305 bp, Artificial Sequence
  Description of Artificial Sequence: Synthetic polynucleotide
cctggccgtcacccctggagagccggcctccatctcctgcaggtctagtgagagcctcctgcatcgtagtggatacacctatttggattggtacctgcagaagccagggcagcctccacaactcctgatctatttgggttctaatcgggcctccggggtccctgacaggttcagtggcagtggatcaggcacagattttacactgaaaatcagcagagtggaggctgaggatgttggggtttattactgcatgcaagctctacaaagtctttctttcggccctgggaccaaagtgcatatcaaac

SEQ ID NO: 6069 - DNA, 334 bp, Artificial Sequence; identical to SEQ ID NO: 3452
  Description of Artificial Sequence: Synthetic polynucleotide

SEQ ID NO: 6070 - protein, 8 aa, Artificial Sequence
  Description of Artificial Sequence: Synthetic peptide
MQALQSLS

SEQ ID NO: 6071 - DNA, 355 bp, Artificial Sequence
  Description of Artificial Sequence: Synthetic polynucleotide
gtgcagctggtgcagtctggggctgaggtgaagaagcctgggtcctcggtgaaggtctcctgcaaggcttctggaggcaatttcaacaattatgctatcaactgggtgcgacaggcccctggacaagggcttgagtggatgggagggatcatccctatctttggaacaccgaactacgcacagaagttccagggcagagtcacgatcagcgcggacaaatccacgatgacagcctacatggaagtgaccagcctgagatctgaggacacggccgtgtactactgtgcgagagattccggcagctctcccagttttgactactggggccagggaaccctggtcaccgtctcctcag

SEQ ID NO: 6072 - DNA, 358 bp, Artificial Sequence; identical to SEQ ID NO: 1391
  Description of Artificial Sequence: Synthetic polynucleotide

SEQ ID NO: 6073 - protein, 12 aa, Artificial Sequence
  Description of Artificial Sequence: Synthetic peptide
ARDSGSSPSFDY

SEQ ID NO: 6074 - DNA, 305 bp, Artificial Sequence
  Description of Artificial Sequence: Synthetic polynucleotide
cctgtccgtcacccctggagagccggcctccatctcctgcaggtctagtcagagcctcctgcacagtactggatacacctatttggattggtacctgcagaagccagggcagtctccacaactcctgatctatttgggttctactcgggcctccgggatccctgacaggttcagtggcagtggatcgggcacagattttacactgaaaatcagcagagtggaggctgaggatgttggggtttattactgcatgcaagctctacaaagtttcaccttcggccaagggacacgactggagattaaac

SEQ ID NO: 6075 - DNA, 334 bp, Artificial Sequence; identical to SEQ ID NO: 1394
  Description of Artificial Sequence: Synthetic polynucleotide

SEQ ID NO: 6076 - protein, 8 aa, Artificial Sequence
  Description of Artificial Sequence: Synthetic peptide
MQALQSFT

SEQ ID NO: 6077 - DNA, 352 bp, Artificial Sequence
  Description of Artificial Sequence: Synthetic polynucleotide
gtgcagctggtgcagtctggggctgaggtgaagaagcctgggtcctcggtgaaggtctcctgcaaggcttctggaggcaccttcagcaactttgctatcagctgggtgcgacaggcccctggacaagggcttgagtggatgggaaggatcatccctgtctttggtacaccaaagtacgcacagaggttccagggcagagtcacgattaccgcggacacattaacgagcacagcctacatggaactgagcagcctgagatctgaggacacggccgtctattactgtgcgcgagatgatggctccggcagcttgtattactggggccagggaaccctggtcaccgtctcctcag

SEQ ID NO: 6078 - DNA, 355 bp, Artificial Sequence; identical to SEQ ID NO: 1553
  Description of Artificial Sequence: Synthetic polynucleotide

SEQ ID NO: 6079 - protein, 11 aa, Artificial Sequence
  Description of Artificial Sequence: Synthetic peptide
ARDDGSGSLYY

SEQ ID NO: 6080 - DNA, 308 bp, Artificial Sequence
  Description of Artificial Sequence: Synthetic polynucleotide
cctgcccgtcacccctggagagccggcctccttctcctgcaggtctagtcagagcctcctgcatcgtgatggaaacaactatttggattggtacctgcagaagccagggcagtctccacaactcctgatctatttgggttctcatcgggcctccggggtccctgacaggttcagtggcagtgggtcaggcacagattttacactgaaaatcaacagagtggaggctgaggatgttggggtttattactgcatgcaagctctacaaactccgatcaccttcggccaagggacacgactggagattaaac

SEQ ID NO: 6081 - DNA, 337 bp, Artificial Sequence; identical to SEQ ID NO: 1556
  Description of Artificial Sequence: Synthetic polynucleotide

SEQ ID NO: 6082 - protein, 9 aa, Artificial Sequence
  Description of Artificial Sequence: Synthetic peptide
MQALQTPIT

SEQ ID NO: 6083 - DNA, 358 bp, Artificial Sequence
  Description of Artificial Sequence: Synthetic polynucleotide
gtgcagctggtgcagtctggggctgaggtgaagaagcctgggtcctcggtgaaggtctcctgcaaggcttctggaggcgccttcaacacgtttgcagtcaactgggtgcgacagacccctggacaagggcttgagtggatgggaggaatcatccctgtctttggaacaccacactacgcacagaagttccagggcagagtcacgattaccgcggacaaatccacgagcacagcctacatggaactgcgcagcctgagatctggagacacggccatttattactgtgcgagaggggggggaggttcggggagcctttttgagtactggggccagggaaccctggtcaccgtctcctcag

SEQ ID NO: 6084 - DNA, 361 bp, Artificial Sequence; identical to SEQ ID NO: 4013
  Description of Artificial Sequence: Synthetic polynucleotide

SEQ ID NO: 6085 - protein, 13 aa, Artificial Sequence
  Description of Artificial Sequence: Synthetic peptide
ARGGGGSGSLFEY

SEQ ID NO: 6086 - DNA, 311 bp, Artificial Sequence
  Description of Artificial Sequence: Synthetic polynucleotide
cctgcccgtcacccctggagagccggcctccatctcctgcaggtcgagtcagagcctcctccatagaaatggatacaactatttggattggtacctgcagaagccagggcagtctccacagctcctgatctatttgggttctcatcgggcctccggggtccctgacaggttcagtggcagtggatcaggcacagattttacactgaaaatcagcagagtggaggctgaggatgttggggtttattactgcatgcaagctctgcaaactcctccgatcaccttcggccaagggacacgactggagattaaac

SEQ ID NO: 6087 - DNA, 340 bp, Artificial Sequence; identical to SEQ ID NO: 4016
  Description of Artificial Sequence: Synthetic polynucleotide

SEQ ID NO: 6088 - protein, 10 aa, Artificial Sequence
  Description of Artificial Sequence: Synthetic peptide
MQALQTPPIT

SEQ ID NO: 6089 - DNA, 352 bp, Artificial Sequence
  Description of Artificial Sequence: Synthetic polynucleotide
cagctggtgcagtctggggctgaggtgaagaagcctgggtcctcggtgagggtctcctgcaaggcttctggaggcaccttcaacaactttgctatccactgggtgcgacaggcccctggacaagggcttgagtccatgggaggcatcatccctgtttttgatactccacactacgcacagaagttccagggcagagtcacgattaccgcggacaaatccacgagcacagcctacatggagctgcgcagcctgacatctgaggacacggccgtgtattactgtgcgagaggcggggggggagctccctctctggactactggggccagggaaccctggtcaccgtctcctcag

SEQ ID NO: 6090 - DNA, 358 bp, Artificial Sequence; identical to SEQ ID NO: 3833
  Description of Artificial Sequence: Synthetic polynucleotide

SEQ ID NO: 6091 - protein, 12 aa, Artificial Sequence
  Description of Artificial Sequence: Synthetic peptide
ARGGGGAPSLDY

SEQ ID NO: 6092 - DNA, 308 bp, Artificial Sequence
  Description of Artificial Sequence: Synthetic polynucleotide
cctgcccgtcacccctggagagccggcctccatctcctgcaggtccagtcagagcctcctgcatagaagtggatacaactatttggattggtacctgcagaagccagggcagtctccacagctcctgatctatatgggttctaatcgggcctccggggtccctgacaggttcagtggcagtggatcaggcacagattttacactgaaaatcagcagagtggaggctgaggatgttggggtttattactgcatgcaagctctacaaactcctgtcaccttcggccaagggacacgactggagattaaac

SEQ ID NO: 6093 - DNA, 337 bp, Artificial Sequence; identical to SEQ ID NO: 3836
  Description of Artificial Sequence: Synthetic polynucleotide

SEQ ID NO: 6094 - protein, 9 aa, Artificial Sequence
  Description of Artificial Sequence: Synthetic peptide
MQALQTPVT

SEQ ID NO: 6095 - DNA, 379 bp, Artificial Sequence
  Description of Artificial Sequence: Synthetic polynucleotide
  modified_base (12)..(12): a, c, t, g, unknown or other
  modified_base (16)..(18): a, c, t, g, unknown or other
caaggaagttcngttnnngaggtgcagctggtggagtctgggggaggcctggtcaagcctggggggtccctgagactctcctgtgaagcctctggattcaccttcagttattataacatgaactgggtccgccaggctccagggagggggctggagtgggtctcctctattagtgatagtagtagttatacatactacacagagtcactgaagggccgattcaccatctccagagacaacgccaagaactccctgtatctgcaaatgaacagcctaagggtcgaggacacggctgtttattactgtgcgagagatgtcgcggctcgttacgcttactttgacttgtggggccagggaaccctggtcaccgtctcctcag

SEQ ID NO: 6096 - DNA, 361 bp, Artificial Sequence; identical to SEQ ID NO: 2027
  Description of Artificial Sequence: Synthetic polynucleotide

SEQ ID NO: 6097 - protein, 13 aa, Artificial Sequence
  Description of Artificial Sequence: Synthetic peptide
ARDVAARYAYFDL

SEQ ID NO: 6098 - DNA, 294 bp, Artificial Sequence
  Description of Artificial Sequence: Synthetic polynucleotide
tgtctgcatctgtcggagacagagtcaccatcacttgccgggccagtcagagtattagtagctggttggcctggtatcagcagaaaccagggaaagcccctaagctcctgatctataaggcgtctaatttagaaagtggggtcccatcaaggttcagcggcagtggatctgggacagaattcactctcaccatcagcagcctgcagcctgatgattttgcaacttattactgccaacagtataacactttttctgcgctcactttcggcggagggaccaaggtggagatcaaac

SEQ ID NO: 6099 - DNA, 325 bp, Artificial Sequence; identical to SEQ ID NO: 174
  Description of Artificial Sequence: Synthetic polynucleotide

SEQ ID NO: 6100 - protein, 10 aa, Artificial Sequence
  Description of Artificial Sequence: Synthetic peptide
QQYNTFSALT

SEQ ID NO: 6101 - DNA, 348 bp, Artificial Sequence
  Description of Artificial Sequence: Synthetic polynucleotide
tggagtctgggggaggcctggtcaagcctggggggtccctgagactctcctgtgcagcctctggactcaccttcactgcctatagaatgaattgggtccgccaggctccagggaaggggctggagtggctctcatcaattagtaatacaaatggcgacatatactatgcagactcagtgaagggccgattcaccatctccagagacaacgccaagaattctctgtatctgcaaatgaacagcctgagggccgacgacacggctgtatattactgtgcgagagatgttgcatctaactacgcttactttgacctttggggccagggaaccctggtcaccgtctcctcag

SEQ ID NO: 6102 - DNA, 361 bp, Artificial Sequence; identical to SEQ ID NO: 2111
  Description of Artificial Sequence: Synthetic polynucleotide

SEQ ID NO: 6103 - protein, 13 aa, Artificial Sequence
  Description of Artificial Sequence: Synthetic peptide
ARDVASNYAYFDL

SEQ ID NO: 6104 - DNA, 296 bp, Artificial Sequence
  Description of Artificial Sequence: Synthetic polynucleotide
cctgtctgcatctgtaggagacagagtcaccatcacttgccgggccagtcagagtattagtacctggttggcctggtatcagcagaaaccagggaaagcccctaaactcctgatctataaggcgtctaatttacaaagtggggtcccgtcaaggttcagcggccgtggatctgggacagcgttcactctcaccatcagcagcctgcagcctgatgattttggaacttattactgccagcaatataatacttattctgcggtcactttcggcggagggaccaaggtggagatcaaac

SEQ ID NO: 6105 - DNA, 325 bp, Artificial Sequence; identical to SEQ ID NO: 2114
  Description of Artificial Sequence: Synthetic polynucleotide

SEQ ID NO: 6106 - protein, 10 aa, Artificial Sequence
  Description of Artificial Sequence: Synthetic peptide
QQYNTYSAVT

SEQ ID NO: 6107 - DNA, 349 bp, Artificial Sequence
  Description of Artificial Sequence: Synthetic polynucleotide
cagctggtggagtctgggggtggcctggtcaggccgggggggtccctgagactctcctgtgcagcctctggattcaccttcagtatttctagtatggcttgggtccgccaggctccagggaaggggctggagtgggtcgcatccatgagtgacactggtagttatacatactacgcagactcattgaatggccgattcaccatctccagagacaacgccaagaactcactgtctctgcaaatgaacagcctgagagtcgaggacacggctctatatttctgtgttcactacggtgactacgcctattttgactactggggccagggagccctggtcaccgtctcctcag

SEQ ID NO: 6108 - DNA, 355 bp, Artificial Sequence; identical to SEQ ID NO: 2561
  Description of Artificial Sequence: Synthetic polynucleotide

SEQ ID NO: 6109 - protein, 11 aa, Artificial Sequence
  Description of Artificial Sequence: Synthetic peptide
VHYGDYAYFDY

SEQ ID NO: 6110 - DNA, 296 bp, Artificial Sequence
  Description of Artificial Sequence: Synthetic polynucleotide
cctgtctgcatcggtaggagacagagtcaccatcacttgccgggccagtcagagtattagtaggtggttggcctggtatcagcagaaaccagggaaagcccctaaagtcctgatctataaggcgtctagtttagaaagtggggtcccatcaaggttcagcggcagtggatctgggacagaattcactctcaccatcagcagcctgcagcctgatgattttgcaacttattactgccaacagtataatacttattctaaaatcactttcggcggagggaccaaggtggagatcaaac

SEQ ID NO: 6111 - DNA, 325 bp, Artificial Sequence; identical to SEQ ID NO: 2564
  Description of Artificial Sequence: Synthetic polynucleotide

SEQ ID NO: 6112 - protein, 10 aa, Artificial Sequence
  Description of Artificial Sequence: Synthetic peptide
QQYNTYSKIT

SEQ ID NO: 6113 - DNA, 342 bp, Artificial Sequence
  Description of Artificial Sequence: Synthetic polynucleotide
tggagtctgggggaggcctggtcaagcctggggggtccctgagactgtcctgtgcagcctctggattcaccttcaggaactataacatgatctgggtccgccaggctccagggaaggggctggagtgggtctcgtccattagtgatactagtagttacatatactacggagactcagtgaagggccgattcaccatctccagagacaacaccaagaactcactgtatctgcaaatgaacagcctgagagccgaggacacggctatgtattactgtgcttcttacggttcctacgcctactttgactactggggccggggaaccctggtcaccgtctcctcag

SEQ ID NO: 6114 - DNA, 355 bp, Artificial Sequence; identical to SEQ ID NO: 2759
  Description of Artificial Sequence: Synthetic polynucleotide

SEQ ID NO: 6115 - protein, 11 aa, Artificial Sequence
  Description of Artificial Sequence: Synthetic peptide
ASYGSYAYFDY

SEQ ID NO: 6116 - DNA, 296 bp, Artificial Sequence
  Description of Artificial Sequence: Synthetic polynucleotide
cctgtctgcatctgtaggagacagagtcaccatcacctgccgggccagtcagagtattagtaggtggttggcctggtatcagcagaaaccagggaaagcccctaaggtcctgatctataaggcgtctagtttggaaagtggggtcccatcaaggttcagcggcagtggatctggaacagaattcactctcaccatcagcagcctgcagcctgatgattttgcaacttattactgccaacagtataatacttattctaacatcactttcggcggagggaccaaggtggagatcaaac

SEQ ID NO: 6117 - DNA, 325 bp, Artificial Sequence; identical to SEQ ID NO: 2762
  Description of Artificial Sequence: Synthetic polynucleotide

SEQ ID NO: 6118 - protein, 10 aa, Artificial Sequence
  Description of Artificial Sequence: Synthetic peptide
QQYNTYSNIT

SEQ ID NO: 6119 - DNA, 354 bp, Artificial Sequence
  Description of Artificial Sequence: Synthetic polynucleotide
tgcagctggtggagtctgggggaggcgtggtccagcctggaaagtccctgagcctctcctgtgcagcctctggattcaccttcagtcactttggcatgcactgggtccgccaggctccaggcaaggggctggagtggttggcagttattttgtatgatggaagtactacatactatgcagactccgtgaagggccgattcaccatatccagagacaattccaagaacacgctgtctctgcacatgaccaacctgaaacctgcggacacggctgtgtatttctgtgcgaaggagggaggagcaacagctgcccttgactactggggccagggaagcctggtcaccgtctcctcag

SEQ ID NO: 6120 - DNA, 358 bp, Artificial Sequence; identical to SEQ ID NO: 1481
  Description of Artificial Sequence: Synthetic polynucleotide

SEQ ID NO: 6121 - protein, 12 aa, Artificial Sequence
  Description of Artificial Sequence: Synthetic peptide
AKEGGATAALDY

SEQ ID NO: 6122 - DNA, 296 bp, Artificial Sequence
  Description of Artificial Sequence: Synthetic polynucleotide
cctgtctgcatctgtgggagacagagtcaccatcacttgccgggccagtcagagtattagtagctggttggcctggtatcagcagaaaccaggaaaagccccgaagctcctgatccataaggcgtctggtttagaaagtggggtcccatcaaggttcagcggcagtggatctgggacagagttcactctcaccatcagcagcctgcagcctgatgattttgcaacttattactgccaacagtataatagttattcttcgtggacgttcggccaagggaccaaggtggaaatgaaac

SEQ ID NO: 6123 - DNA, 325 bp, Artificial Sequence; identical to SEQ ID NO: 1484
  Description of Artificial Sequence: Synthetic polynucleotide

SEQ ID NO: 6124 - protein, 10 aa, Artificial Sequence
  Description of Artificial Sequence: Synthetic peptide
QQYNSYSSWT

SEQ ID NO: 6125 - DNA, 376 bp, Artificial Sequence
  Description of Artificial Sequence: Synthetic polynucleotide
gtggagtctgggggaggcgtggtccagcctgggaggtccctgagactctcctgtgcagcctctgtattcaccttcagtaactttgccatgcactgggtccgccaggctcctggcaaggggctggagtgggtggcagttatttcatatgatggaagtgataaatactatgcagactccgtgaagggccgattcaccatctccagagacaattccaagaagaaagtgtatctggaaatgaacagcctgagaactgaggacacggctgtgtattactgtgcgaaagattcgcagaattacgattattggagcggtaatttattcgacgggggctactttgacaactggggccagggaaccctggtcaccgtctcctcag

SEQ ID NO: 6126 - DNA, 388 bp, Artificial Sequence; identical to SEQ ID NO: 1301
  Description of Artificial Sequence: Synthetic polynucleotide

SEQ ID NO: 6127 - protein, 22 aa, Artificial Sequence
  Description of Artificial Sequence: Synthetic peptide
AKDSQNYDYWSGNLFDGGYFDN

SEQ ID NO: 6128 - DNA, 292 bp, Artificial Sequence
  Description of Artificial Sequence: Synthetic polynucleotide
ctgtctgcatctataggagacagagtcaccatcacttgccgggccagtcaggatattagtagctacttggcctggtatcagcagaaagttgggaaagcccctaaactcctcatctatgtggcgtctcgtctagaaagtggggtcccgtcaaggttcagcggcattagatctgggacagaattcactctcaccatcagcagcctgcagcctgatgattttgcaacttattactgccagcaatatcttagttaccctcggacgttcggccaagggaccaaggtggaattcaaac

SEQ ID NO: 6129 - DNA, 322 bp, Artificial Sequence; identical to SEQ ID NO: 1304
  Description of Artificial Sequence: Synthetic polynucleotide

SEQ ID NO: 6130 - protein, 9 aa, Artificial Sequence
  Description of Artificial Sequence: Synthetic peptide
QQYLSYPRT

SEQ ID NO: 6131 - DNA, 334 bp, Artificial Sequence
  Description of Artificial Sequence: Synthetic polynucleotide
ggaggcgtggtccgacctgggaggtccctgagactctcctgtgcagcctctggattcaccttcaaccactttggcatgcactgggtccgccaggctccgggcaaggggctggagtgggtggcagttatttcatatgatggaagtactcaatactatgcagactccgtgaagggccgattcaccatctccagagacaattccaagaacacgctgtatctgcaaatgaacagcctgagacttgaggacacggctgtttattactgtgcgaaagaaggggggggtactggggctaatgactactggggccagggaagcctggtcaccgtctcctcag

SEQ ID NO: 6132 - DNA, 358 bp, Artificial Sequence; identical to SEQ ID NO: 2123
  Description of Artificial Sequence: Synthetic polynucleotide

SEQ ID NO: 6133 - protein, 12 aa, Artificial Sequence
  Description of Artificial Sequence: Synthetic peptide
AKEGGGTGANDY

SEQ ID NO: 6134 - DNA, 291 bp, Artificial Sequence
  Description of Artificial Sequence: Synthetic polynucleotide
tgtctgcatctgtcggagacagagtcaccatcacttgccgggccagtcagagtcttagtacttggttggcctggtatcagcagaaaccagggaaagcccctaggctcctgatctatttggcgtctggtttagaaagtggggtcccatcaaggttcagcggcagtggatctgggacagaattcactctcaccatcagcagcctgcagcctgatgattttgcaacttattactgccaacagtataatcgttacccgtggacgttcggccaagggaccaaggtggaaatcaaac

SEQ ID NO: 6135 - DNA, 322 bp, Artificial Sequence; identical to SEQ ID NO: 2126
  Description of Artificial Sequence: Synthetic polynucleotide

SEQ ID NO: 6136 - protein, 9 aa, Artificial Sequence
  Description of Artificial Sequence: Synthetic peptide
QQYNRYPWT

SEQ ID NO: 6137 - DNA, 343 bp, Artificial Sequence
  Description of Artificial Sequence: Synthetic polynucleotide
gagtctgggggaggcgtggtccagcctgggaggtccctgagactctcctgtgcagcctctggattcaccttcagtcactatgccatgcactgggtccgccaggctccaggcaaggggttggagtgggtggcagttataacatatgatggaagtaattcattttatgcaacctccgtgaagggccgattcaccatctccagagacagatccaagaatacggtgtctctgcaaatgaacaacctgggacctgaggacacggctatctattattgtgcgaaagaaggggggggttctggggctaatgattactggggccagggaaccctggtcaccgtctcctcag

SEQ ID NO: 6138 - DNA, 358 bp, Artificial Sequence; identical to SEQ ID NO: 1961
  Description of Artificial Sequence: Synthetic polynucleotide

SEQ ID NO: 6139 - protein, 12 aa, Artificial Sequence
  Description of Artificial Sequence: Synthetic peptide
AKEGGGSGANDY

SEQ ID NO: 6140 - DNA, 293 bp, Artificial Sequence
  Description of Artificial Sequence: Synthetic polynucleotide
cctgtctgcatctgtcggagacagagtcaccatcacttgccgggccagtcagagtgttagtacctggttggcctggtatcagcagaaaccagggaaagtccctgagctcctcatctctaagacgtctgatttagaaagtggggtcccatcacggttcagcggcagtggatctgggacagaattcactctcaccatcaccagcctgcagcctgatgattttgcaacttattactgccaacagtataatagatacccgtggaggttcggccaagggaccaaggtggaaatcaaac

SEQ ID NO: 6141 - DNA, 322 bp, Artificial Sequence; identical to SEQ ID NO: 1964
  Description of Artificial Sequence: Synthetic polynucleotide

SEQ ID NO: 6142 - protein, 9 aa, Artificial Sequence
  Description of Artificial Sequence: Synthetic peptide
QQYNRYPWR

SEQ ID NO: 6143 - DNA, 362 bp, Artificial Sequence
  Description of Artificial Sequence: Synthetic polynucleotide
gcagctggtggagtctgggggaggcgtggtccagcccgggaggtccctgagactctcctgtgcagcctctggattcaccttcagcgactatatcatgcactgggtccgccaggctccaggcaaggggctggagtgggtggcagttatatggtctgatggagataataagcattatttagaatccgtaaagggccggttcaccatctccagagacaattctaagaaaatgctgtttctggaaatcaacagcctgagagccgaggacacggctgtctattactgtgtgagcgagagtcgtgtgtggcatcttctgggctactttgacaactggggccggggaaccccggtcaccgtctcttcag

SEQ ID NO: 6144 - DNA, 367 bp, Artificial Sequence; identical to SEQ ID NO: 833
  Description of Artificial Sequence: Synthetic polynucleotide

SEQ ID NO: 6145 - protein, 15 aa, Artificial Sequence
  Description of Artificial Sequence: Synthetic peptide
VSESRVWHLLGYFDN

SEQ ID NO: 6146 - DNA, 293 bp, Artificial Sequence
  Description of Artificial Sequence: Synthetic polynucleotide
cctgtctttgtctccaggggagagagccaccctctcctgcagggccagtcagagtattagcacttacttagcctggtaccaacagaaacctggccaggctccccggctcctcatctatgatgcatccacccgggccactggcatcccagccaggttcagtggcagtggctctgggacagacttcactctgaccatcagtggcctagagcctgaagattttgcagtttattactgtcagcagcggagcggctggccagtcactttcggccctgggaccaaggtggacatcaaac

SEQ ID NO: 6147 - DNA, 322 bp, Artificial Sequence; identical to SEQ ID NO: 836
  Description of Artificial Sequence: Synthetic polynucleotide

SEQ ID NO: 6148 - protein, 9 aa, Artificial Sequence
  Description of Artificial Sequence: Synthetic peptide
QQRSGWPVT

SEQ ID NO: 6149 - DNA, 363 bp, Artificial Sequence
  Description of Artificial Sequence: Synthetic polynucleotide
tggagtctggaggaagagtggtgcagcctgggaggtccctgagactctcctgtgcagcgtctggattcacgttaagtagatatggcatgcactgggtccgccaggctccaggcaaggggctggagtgggtggcagtcagttggtatgacgcaagtaatgaagagtatgcagagtccgtgaagggccgattcaccatctccagagacaattccaagaacacactgtatctgcaaatgaatagcctgagagccgaggactcggctgtctattactgtgcgagagattattatgcctttgacgaggtgggacctattaattgctttgaatattggggccggggaacccaggtcaccgtctcctcag

SEQ ID NO: 6150 - DNA, 376 bp, Artificial Sequence
  Description of Artificial Sequence: Synthetic polynucleotide
caggtgcagctggtggagtctggaggaagagtggtgcagcctgggaggtccctgagactctcctgtgcagcgtctggattcacgttaagtagatatggcatgcactgggtccgccaggctccaggcaaggggctggagtgggtggcagtcagttggtatgacgcaagtaatgaagagtatgcagagtccgtgaagggccgattcaccatctccagagacaattccaagaacacactgtatctgcaaatgaatagcctgagagccgaggactcggctgtctattactgtgcgagagattattatgcctttgacgaggtgggacctattaattgctttgaatattggggccggggaacccaggtcaccgtctcctcag

SEQ ID NO: 6151 - protein, 18 aa, Artificial Sequence
  Description of Artificial Sequence: Synthetic peptide
ARDYYAFDEVGPINCFEY

SEQ ID NO: 6152 - DNA, 295 bp, Artificial Sequence
  Description of Artificial Sequence: Synthetic polynucleotide
ctgtctttgtctccagggaaaagagccaccctctcctgcagggccagtcagagtgttgacagcaactacttagcctggtaccaacagaaacctggccaggctcccaggctcctcatctctggtgcatccaacagggccactggcatcccagccaggttcagtggcagtgggtctgggaaagacttcactctcaccatcagcagcctagagtctgaagattttgcagtttattactgtcagcagcgtagcaactggcctctcactttcggccctgggaccaaagtggatgtcaaac

SEQ ID NO: 6153 - DNA, 325 bp, Artificial Sequence; identical to SEQ ID NO: 4652
  Description of Artificial Sequence: Synthetic polynucleotide

SEQ ID NO: 6154 - protein, 9 aa, Artificial Sequence
  Description of Artificial Sequence: Synthetic peptide
QQRSNWPLT

SEQ ID NO: 6155 - DNA, 363 bp, Artificial Sequence
  Description of Artificial Sequence: Synthetic polynucleotide
tggagtctgggggaggcgtagtccagcctgggaggtccctgagactctcctgtgcggcgtctggatttaggttcagtagctatggcatgcactgggtccgccaggctccaggcaaggggctggagtgggtggcagttatatggtatgatggaagtaataaagagtatagagactctgtgacgggccgattcaccatctccagagacaattccaagaacacgctgtatctgcaaatggacagcctgcgagccgaggacacggctgtttatttctgtgcgagagattcctacccctttgatgaggtgggacctattaactactttgcctactggggccagggaaccctggtcaccgtctcctcag

SEQ ID NO: 6156 - DNA, 376 bp, Artificial Sequence; identical to SEQ ID NO: 221
  Description of Artificial Sequence: Synthetic polynucleotide

SEQ ID NO: 6157 - protein, 18 aa, Artificial Sequence
  Description of Artificial Sequence: Synthetic peptide
ARDSYPFDEVGPINYFAY

SEQ ID NO: 6158 - DNA, 285 bp, Artificial Sequence
  Description of Artificial Sequence: Synthetic polynucleotide
tgtctttgtctccaggggaaagagccaccctctcctgcagggccagtcagactgttaacttagcctggtaccaacagaaacctggccaggctcccaggctcctcatctatgatgcatccaacagggccactggcatcccagccaggttcagtggcagtgggtctgggacagacttcactctcaccatcagcagcctagagcctgaagattttgcagtttattactgtcagcagcgtacccactggcctctcactttcggccctgggaccaaagtggatatcaaac

SEQ ID NO: 6159 - DNA, 316 bp, Artificial Sequence; identical to SEQ ID NO: 222
  Description of Artificial Sequence: Synthetic polynucleotide

SEQ ID NO: 6160 - protein, 9 aa, Artificial Sequence
  Description of Artificial Sequence: Synthetic peptide
QQRTHWPLT

SEQ ID NO: 6161 - DNA, 393 bp, Artificial Sequence
  Description of Artificial Sequence: Synthetic polynucleotide
  modified_base (15)..(17): a, c, t, g, unknown or other
aggtgttcccagtgnnncaggtgcagctggtggagtctgggggaggcgtggtccagcctgggaggtccctgagactctcctgtgaagtgtctggtttcaccctcaggagatatggcatgcactgggtccgccaggctcctgggagggggctggagtgggtggcagttacatggtatgatggaagtaatgaagagtattcagacgccgtcaagggccgattcacaatctccagagacaatttcaagaatagggtgtttctgcaaatgaacagcctgagagccgaagacacggctgtctattactgtgcgagagactcgaacgccttcgatgaggtgggaggagtgaactactttgaccgctggggccagggaaccctggtcaccgtctcctcag

SEQ ID NO: 6162 - DNA, 376 bp, Artificial Sequence
  Description of Artificial Sequence: Synthetic polynucleotide
caggtgcagctggtggagtctgggggaggcgtggtccagcctgggaggtccctgagactctcctgtgaagtgtctggtttcaccctcaggagatatggcatgcactgggtccgccaggctcctgggagggggctggagtgggtggcagttacatggtatgatggaagtaatgaagagtattcagacgccgtcaagggccgattcacaatctccagagacaatttcaagaatagggtgtttctgcaaatgaacagcctgagagccgaagacacggctgtctattactgtgcgagagactcgaacgccttcgatgaggtgggaggagtgaactactttgaccgctggggccagggaaccctggtcaccgtctcctcag

SEQ ID NO: 6163 - protein, 18 aa, Artificial Sequence
  Description of Artificial Sequence: Synthetic peptide
ARDSNAFDEVGGVNYFDR

SEQ ID NO: 6164 - DNA, 313 bp, Artificial Sequence
  Description of Artificial Sequence: Synthetic polynucleotide
  modified_base (4)..(4): a, c, t, g, unknown or other
  modified_base (6)..(7): a, c, t, g, unknown or other
  modified_base (13)..(16): a, c, t, g, unknown or other
  modified_base (18)..(19): a, c, t, g, unknown or other
tatntnncccccnnnncnntctccctgtctttgtctccaggggaaagagccaccctctcctgcagggccagtcagagtgttaatttcttagtctggtaccaacagaaacctggccaggctcccagactcctcatgtatgatacatccaacagggccactggcatcccagccaggttcagtggcagtgggtctgggacagacttcactctcaccatcagcagcctagagcctgaagattttgctgtttattactgtcagcagcgtagccactggcctctcactttcggccctgggaccaaagtcgaaatcaaac

SEQ ID NO: 6165 - DNA, 319 bp, Artificial Sequence; identical to SEQ ID NO: 4772
  Description of Artificial Sequence: Synthetic polynucleotide

SEQ ID NO: 6166 - protein, 9 aa, Artificial Sequence
  Description of Artificial Sequence: Synthetic peptide
QQRSHWPLT

SEQ ID NO: 6167 - DNA, 352 bp, Artificial Sequence
  Description of Artificial Sequence: Synthetic polynucleotide
gtgcagctggtgcagtctggggctgaggtgaagaagcctggggcctcagtgaaggtctcctgcaaggcttctggatactttttcaccggccactatttgcactgggtgcgacaggcccctggacaagggcttgagtggatgggatggatcaaccctaacagtggtgacacacactatgcacagaggtttcaggggagggtcaccatgaccagggacacgtccatcagcacagcctacatggaggtgagcaggctgagatctgacgacacggccgtttattactgtgcgagatttcgagggatgtcggactttgacttctggggccagggaaccctggtcaccgtctcctcag

SEQ ID NO: 6168 - DNA, 355 bp, Artificial Sequence; identical to SEQ ID NO: 1829
  Description of Artificial Sequence: Synthetic polynucleotide

SEQ ID NO: 6169 - protein, 11 aa, Artificial Sequence
  Description of Artificial Sequence: Synthetic peptide
ARFRGMSDFDF

SEQ ID NO: 6170 - DNA, 320 bp, Artificial Sequence
  Description of Artificial Sequence: Synthetic polynucleotide
gactcagcctccctccgcgtccgggtctcctggacagtcagtcaccatctcctgcactggaaccagcagtgacgttggtggttttaactttgtctcctggtaccaacagcacccaggcaaagcccccaaactcatgatttatgaggtcactaagcggccctcaggggtccctgatcgcttctcgggctccaagtctggcaacacggcctccctgaccgtctctgggctccagtctgaggatgaggctgattattactgcagctcatatgcaggcagaaataatttggtattcggcggagggaccaagctgaccgtcctag

SEQ ID NO: 6171 - DNA, 331 bp, Artificial Sequence; identical to SEQ ID NO: 1832
  Description of Artificial Sequence: Synthetic polynucleotide

SEQ ID NO: 6172 - protein, 10 aa, Artificial Sequence
  Description of Artificial Sequence: Synthetic peptide
SSYAGRNNLV

SEQ ID NO: 6173 - DNA, 349 bp, Artificial Sequence
  Description of Artificial Sequence: Synthetic polynucleotide
agctggtgcagtctgggactggggtgaagaagcctggggcctctgtgacggtctcctgcaaggcttctggatacgccttcaccggttactatatatcgtggctgcgacaggcccctggacaagggcttgagtggatgggatggatgaaccctaatagtggtgacacaagctatgcacagaagtttcagggcagggtcaccatgaccagggacacgtccatcagcacagcctacatggagctgagtagactgacatttgacgacacggccatatattattgtgcgacttattacgacgacaatacagctctggtatattggggcctgggaacccaggtcaccgtctcctc

SEQ ID NO: 6174 - DNA, 356 bp, Artificial Sequence; identical to SEQ ID NO: 2309
  Description of Artificial Sequence: Synthetic polynucleotide

SEQ ID NO: 6175 - protein, 12 aa, Artificial Sequence
  Description of Artificial Sequence: Synthetic peptide
ATYYDDNTALVY

SEQ ID NO: 6176 - DNA, 347 bp, Artificial Sequence
  Description of Artificial Sequence: Synthetic polynucleotide
  modified_base (17)..(17): a, c, t, g, unknown or other
caactgcaaccggttcntgggcccagtctgtgctgactcagcctccctccgcgtccgggtctcctggacagtcagtcaccatctcctgcactggaagcagcagtgacgttggtttttttaactctgtctcctggtaccaacaacacccaggcaaggcccccaaactcatcatttatgcggtcagtaagcggccctcaggggtccctgatcgcttctctggctccaagtctggcaacacggcctccctgaccgtccttgggctccaggctgaggatgaggctgaatatttctgcagttcatatgcaggcaggcacaaattggtcttcggcggagggaccaagctgacc

SEQ ID NO: 6177 - DNA, 324 bp, Artificial Sequence; identical to SEQ ID NO: 2312
  Description of Artificial Sequence: Synthetic polynucleotide

SEQ ID NO: 6178 - protein, 10 aa, Artificial Sequence
  Description of Artificial Sequence: Synthetic peptide
SSYAGRHKLV

SEQ ID NO: 6179 - DNA, 355 bp, Artificial Sequence
  Description of Artificial Sequence: Synthetic polynucleotide
gtgcagctggtgcagtctggggctgaggtgaagaagcctggggcctcagtgaaggtctcctgcaaggcctctggatacaccttcaccggctactatatgcaatgggtgcgacaggcccctggacaagggctggagtggatgggatggatgaaccctaacaatggtggcacaacctatgcacagaagtttcagggcagggtcaccatgaccagggacacgtccaccagcacagcctacatggagttgagcaggctaagatctgacgacacggccgtgtatttttgtgggaggactttcggtggtccctcgcaatcagactattggggccagggaaccctggtcaccgtctcctcag

SEQ ID NO: 6180 - DNA, 358 bp, Artificial Sequence; identical to SEQ ID NO: 2345
  Description of Artificial Sequence: Synthetic polynucleotide

SEQ ID NO: 6181 - protein, 12 aa, Artificial Sequence
  Description of Artificial Sequence: Synthetic peptide
GRTFGGPSQSDY

SEQ ID NO: 6182 - DNA, 319 bp, Artificial Sequence
  Description of Artificial Sequence: Synthetic polynucleotide
gactcagcctccctccgcgtccgggtctcctggacagtcagtcaccatctcctgcactggaaccagcagtgacgttggtgattatgactatgtctcctggtatcaacagcacccaggcaaagcccccaaactcatggtttatgaggtcagtaagcggccctcaggggtccctgatcgcttctctggctccaagtctggcaacacggcctccctgaccgtctctgggctccaggctgaggatgaggctgaatattactgcacctcatatgcaggccgcaacaatgtggtcttcggcggagggaccaagctgaccgtccta

SEQ ID NO: 6183 - DNA, 330 bp, Artificial Sequence; identical to SEQ ID NO: 2348
  Description of Artificial Sequence: Synthetic polynucleotide

SEQ ID NO: 6184 - protein, 10 aa, Artificial Sequence
  Description of Artificial Sequence: Synthetic peptide
TSYAGRNNVV

SEQ ID NO: 6185 - DNA, 343 bp, Artificial Sequence
  Description of Artificial Sequence: Synthetic polynucleotide
tctggggctgaagtgaagaagcctggggcctcagtgacaatttcctgtaagacgtctggatacactttcaccgactactatatacactgggtgcgccaggcccctggacaaagacttgagtggatgggattgatcgacccaaccgttggtggtgacataagttacgcacagaaattccagggcagagtcaccatgaccagggacacgtccacgagcacagtctacatggacctcagcagcctgagatctgacgacacggccgtctattactgtgggaaatccatgactcacgtggacccaacccttgactactggggccagggaaccctggtcaccgtctcct

SEQ ID NO: 6186 - DNA, 361 bp, Artificial Sequence; identical to SEQ ID NO: 479
  Description of Artificial Sequence: Synthetic polynucleotide

SEQ ID NO: 6187 - protein, 13 aa, Artificial Sequence
  Description of Artificial Sequence: Synthetic peptide
GKSMTHVDPTLDY

SEQ ID NO: 6188 - DNA, 293 bp, Artificial Sequence
  Description of Artificial Sequence: Synthetic polynucleotide
cctgtctgtgtctccaggggaaagagccaccctctcctgcagggccagtcggagtgttggcaacaacttagcctggtaccaacagaaacctggccaggctcccaggctcttcatctttgatgcatccaccagggccactggtatcccagccaggttcagtggcagtgggtctgggacagaattcactctcaccatcagcagcctgcagtctgaagatatagcagtttattactgtgaacagtataataactggcctccctcttttggccaggggaccaagctggagatcaaac

SEQ ID NO: 6189 - DNA, 322 bp, Artificial Sequence; identical to SEQ ID NO: 482
  Description of Artificial Sequence: Synthetic polynucleotide

SEQ ID NO: 6190 - protein, 9 aa, Artificial Sequence
  Description of Artificial Sequence: Synthetic peptide
EQYNNWPPS

SEQ ID NO: 6191 - DNA, 344 bp, Artificial Sequence
  Description of Artificial Sequence: Synthetic polynucleotide
cagtctggggctgaggtgcagaagcctggggcctcagtgaaaatttcctgcaaggcatctggatacaccttcacccacttctacatacactgggtgcgccagacccctagacaagggcttgagtggatgggactaatcgaccctgatggtggttccacaacatacgcccagcaattccagggcagagtcaccatgaccagggacacgtccacgaacacagtctacatggagctgagcagcctcagatctgaggacacggccatgtattactgtgcgaaacccgtcactccggtggacccaacctttgactactggggccagggaaccgtggtcaccgtctcctc

SEQ ID NO: 6192 - DNA, 359 bp, Artificial Sequence; identical to SEQ ID NO: 863
  Description of Artificial Sequence: Synthetic polynucleotide

SEQ ID NO: 6193 - protein, 13 aa, Artificial Sequence
  Description of Artificial Sequence: Synthetic peptide
AKPVTPVDPTFDY

SEQ ID NO: 6194 - DNA, 287 bp, Artificial Sequence
  Description of Artificial Sequence: Synthetic polynucleotide
ccctgtgtctccaggggaaagagccaccctctcctgcagggccagtcagcgtgtgacccacaacttagtctggtaccagcagaaacctggccaggctccccggctcctcatctatgatgcatccaccagggcccctggtatcccggccagattcagtggcagtgggtctgggacagagttcactctcaccatcagcagcctgcagtctgaagattctgcagtttattactgtcagcagtatgataggtggcctccctcttttggccgggggaccaagctggagatca

SEQ ID NO: 6195 - DNA, 319 bp, Artificial Sequence; identical to SEQ ID NO: 866
  Description of Artificial Sequence: Synthetic polynucleotide

SEQ ID NO: 6196 - protein, 9 aa, Artificial Sequence
  Description of Artificial Sequence: Synthetic peptide
QQYDRWPPS

SEQ ID NO: 6197 - DNA, 364 bp, Artificial Sequence
  Description of Artificial Sequence: Synthetic polynucleotide
gtgcagctggtgcagtctggggctgaggtgaagaagcctggggcctcagtgaaggtttcctgcaagacatctggatacattctcaccagctactatatgcactgggtgcgacaggcccctggacacggacttgagtggatgggaattatcaaccctagtggtggtagcacaagctacgcacagaagttccagggcagagtcaccatgaccagggacacgtccacgagcacagtctacatggagctgagcagcctgagatctgaggacacggccgtgtattactgtgcgagagccacccaaaaggatcgcagaggctggctgtttgactcctggggccagggaaccctggtcaccgtctcctcag

SEQ ID NO: 6198 - DNA, 367 bp, Artificial Sequence; identical to SEQ ID NO: 1673
  Description of Artificial Sequence: Synthetic polynucleotide

SEQ ID NO: 6199 - protein, 15 aa, Artificial Sequence
  Description of Artificial Sequence: Synthetic peptide
ARATQKDRRGWLFDS

SEQ ID NO: 6200 - DNA, 281 bp, Artificial Sequence
  Description of Artificial Sequence: Synthetic polynucleotide
cctgtctgtgtctccaggggaaagagccaccctctcctgcagggccagtcagagtgttagcagcaacttagcctggtatcagcaaaaacctggccaggctcccaggctcctcatctatggtgcatccaccagggccactggtatcccagccaggttcagtggcagtgggtctgggacagagttcactctcaccatcagcggcctgcagtctgaagattttgcagtttattactgtcagcacttcgggacttttggccaggggaccaagctggagatcaaac

SEQ ID NO: 6201 - DNA, 310 bp, Artificial Sequence; identical to SEQ ID NO: 1676
  Description of Artificial Sequence: Synthetic polynucleotide

SEQ ID NO: 6202 - protein, 5 aa, Artificial Sequence
  Description of Artificial Sequence: Synthetic peptide
QHFGT

SEQ ID NO: 6203 - DNA, 337 bp, Artificial Sequence
  Description of Artificial Sequence: Synthetic polynucleotide
tctggggctgtagtgaagaagcctgggtcctcggtgaaggtctcctgcaaggcttctggaggctccttcagcaactttgctatgcactgggtgcgacaggcccctggacaagggcttgagtggatgggaggcctcatccctgcctttggaacaccacactacgcacagggcttgcagggcagagtcaccatttccgcggacgagtccacgagcacggcctacatggagctgagcggcctgagaagtgacgacacggccgtgtattactgtgcgagagaggggggtaacagtggccttgagtactggggccagggaaccctggtcaccgtctcctcag

SEQ ID NO: 6204 - DNA, 355 bp, Artificial Sequence; identical to SEQ ID NO: 569
  Description of Artificial Sequence: Synthetic polynucleotide

SEQ ID NO: 6205 - protein, 11 aa, Artificial Sequence
  Description of Artificial Sequence: Synthetic peptide
AREGGNSGLEY

SEQ ID NO: 6206 - DNA, 296 bp, Artificial Sequence
  Description of Artificial Sequence: Synthetic polynucleotide
cctgtctgcatctgttggtgacagagtcaccatcacttgccgggccagtcagagtattggttcctggttggcctggtatcagcaaaagccagggagagcccctaagctcctgatctctaaggcgtctgatttagaaactggggtcccatcaaggttcagcggcagtggatctgggacagaattcactctcaccatcagcagcctgcagcctgatgattttgcaacttattactgccaaaaatataatacttattcgtcgctcactttcggcggagggaccaaggtggagatcaaac

SEQ ID NO: 6207 - DNA, 325 bp, Artificial Sequence; identical to SEQ ID NO: 572
  Description of Artificial Sequence: Synthetic polynucleotide

SEQ ID NO: 6208 - protein, 10 aa, Artificial Sequence
  Description of Artificial Sequence: Synthetic peptide
QKYNTYSSLT

SEQ ID NO: 6209 - DNA, 344 bp, Artificial Sequence
  Description of Artificial Sequence: Synthetic polynucleotide
gtgcagctggtgcagtctggggctgaggtgaagaagcctgggtcctcggtgaaggtctcctgcaaggcttctggaggcaccttcagcaactatgctatcacctgggtgcgacaggcccctggacaagggcttgagtggatgggagagatcatccctgtctttggaacaccaaagtatgcacagaagttccagggcagagtcacgataaccgcggacgaatccacgagcacagcctacatggagatgagcagcctgagatctgaggacacggccgtatattactgcgcgagaggtgtttggggccttgactactggggccagggaaccctggtcaccgtctcctc

SEQ ID NO: 6210 - DNA, 347 bp, Artificial Sequence; identical to SEQ ID NO: 701
  Description of Artificial Sequence: Synthetic polynucleotide

SEQ ID NO: 6211 - protein, 9 aa, Artificial Sequence
  Description of Artificial Sequence: Synthetic peptide
ARGVWGLDY

SEQ ID NO: 6212 - DNA, 287 bp, Artificial Sequence
  Description of Artificial Sequence: Synthetic polynucleotide
tgcatctgtaggagacagagtcaccatcacttgccgggccagtcagagtattagtagctggttggcctggtatcagcagaaaccagggaaagcccctaagctcctgatctataaggcgtctagtttagaaagtggggtcccatcaaggttcagcggcagtggatctgggacagaattcactctcaccatcagcagcctgcagcctgatgattttgcaacttattactgccaacagtataatagttaccccctcactttcggcggagggaccaaggtggagatcaaac

SEQ ID NO: 6213 - DNA, 322 bp, Artificial Sequence; identical to SEQ ID NO: 704
  Description of Artificial Sequence: Synthetic polynucleotide

SEQ ID NO: 6214 - protein, 9 aa, Artificial Sequence
  Description of Artificial Sequence: Synthetic peptide
QQYNSYPLT

SEQ ID NO: 6215 - DNA, 355 bp, Artificial Sequence
  Description of Artificial Sequence: Synthetic polynucleotide
gtgcagctggtgcagtctggggctgaggtgaagaagcctgggtcctcggtgagggtctcctgcaaggcttctggaggcgccttcagcaactatgctttcagctgggtgcgacaggcccctggacaagggcttgagtggatgggagtgatcatccctgtctttggtacaccatactatgcacagaagttccagggcagactcacgattagcgcggacgaatccgcgaccacagcctatatggatctgagcaccctgacatctgacgacacggccgtgtattactgtgcgagagggggaggagcagtggctgccaatccttactggggccagggaaccctggtcaccgtctcctcag

SEQ ID NO: 6216 - DNA, 358 bp, Artificial Sequence; identical to SEQ ID NO: 3521
  Description of Artificial Sequence: Synthetic polynucleotide

SEQ ID NO: 6217 - protein, 12 aa, Artificial Sequence
  Description of Artificial Sequence: Synthetic peptide
ARGGGAVAANPY

SEQ ID NO: 6218 - DNA, 296 bp, Artificial Sequence
  Description of Artificial Sequence: Synthetic polynucleotide
cctgtctgcatttgtgggagacagagtcaccatcacttgccgggccagtcagagtattagtagctggttggcctggtatcaacagaaaccagggaaagcccctaagctcctgatctattcggcgtctagtttagaaactggggtcccatcaaggttcagcggcagtggatctgggacagaattcactctcaccatcagcggcctgcagcctgatgattttgcaacttattactgccaacagtataatagttattcgtcgctcactttcggcggagggaccaaggtggagatcaaac

SEQ ID NO: 6219 - DNA, 325 bp, Artificial Sequence; identical to SEQ ID NO: 3524
  Description of Artificial Sequence: Synthetic polynucleotide

SEQ ID NO: 6220 - protein, 10 aa, Artificial Sequence
  Description of Artificial Sequence: Synthetic peptide
QQYNSYSSLT

SEQ ID NO: 6221 - DNA, 355 bp, Artificial Sequence
  Description of Artificial Sequence: Synthetic polynucleotide
gtgcagctggtgcagtctgggcctgaggtgaagaagcctgggtcctcggtgaaggtctcctgcaaggcttctggaggcaccttcagcaactatggaatcagctgggtgcgacaggcccctggacaagggcttgagtggatgggattgatcatccctatctttggcacagcgaactacgcacagaagttccagggcagagtcacgattaccgcggacgaatctacaaacacagtctacatggagctgagcagcctgagatctgaagacacggccttttattattgttcgagagatgacgggggtgggacttactcggcctactggggccagggaaccctggtcaccgtctcctcag

SEQ ID NO: 6222 - DNA, 358 bp, Artificial Sequence; identical to SEQ ID NO: 2537
  Description of Artificial Sequence: Synthetic polynucleotide

SEQ ID NO: 6223 - protein, 12 aa, Artificial Sequence
  Description of Artificial Sequence: Synthetic peptide
SRDDGGGTYSAY

SEQ ID NO: 6224 - DNA, 308 bp, Artificial Sequence
  Description of Artificial Sequence: Synthetic polynucleotide
cctgtccgtcacccctggacagccggcctccatctcctgcaagtctagtcagagcctcctgcatagggatggaaagacctatttccattggttctttcagaagccaggccagcctccacagcccctgatctatgaggtttccaatcggttctccggagtgccagataggttcagtggcagcgggtcggggacagattgcacactgaaaatcagccgggtggaggctgaggatgttggggtttattactgcatgcaaagcatacagcttccgctcactttcggcggagggaccaaggtggagatcaaac

SEQ ID NO: 6225 - DNA, 337 bp, Artificial Sequence; identical to SEQ ID NO: 2540
  Description of Artificial Sequence: Synthetic polynucleotide

SEQ ID NO: 6226 - protein, 9 aa, Artificial Sequence
  Description of Artificial Sequence: Synthetic peptide
MQSIQLPLT

SEQ ID NO: 6227 - DNA, 355 bp, Artificial Sequence
  Description of Artificial Sequence: Synthetic polynucleotide
gtgcagctggtgcagtctggggctgaggtgaagaagcctgggtcctcggtgaaggtctcctgcaagacttctgggggcaccttcaacacctatactatcacctggctgcgacaggcccctggacaagggcttgagtggatgggagggatcatccctatctttggtactgcaaactacgcacagaagttccagggcagagtcacgattaccgcggacgaatcctcgagtacagcctacatggaactgagcagcctgagatctgaggacacggccgtctattactgtgcgagagatgacgggggtgggagctactcggcctactggggccagggaaccctggtcaccgtctcctcag

SEQ ID NO: 6228 - DNA, 358 bp, Artificial Sequence; identical to SEQ ID NO: 2483
  Description of Artificial Sequence: Synthetic polynucleotide

SEQ ID NO: 6229 - protein, 12 aa, Artificial Sequence
  Description of Artificial Sequence: Synthetic peptide
ARDDGGGSYSAY

SEQ ID NO: 6230 - DNA, 308 bp, Artificial Sequence
  Description of Artificial Sequence: Synthetic polynucleotide
cctgtccgtcacccctggacagccggcctccatctcctgcaagtctagtcagagcctcctgcatcgtgatggaaagacgtatttgcattggcacctgcagaggccaggccagcctccacagcccctgatctatgaagtttccaaccggttctctggagtgccagataggttcagtggcagcgggtcagggacacatttcacactgagaatcagccgggtggaggctgaggatgttggggtttattactgcatgcaaagtatacagcttccgctcactttcggcggagggaccaaggtggagattaaac

SEQ ID NO: 6231 - DNA, 337 bp, Artificial Sequence; identical to SEQ ID NO: 2486
  Description of Artificial Sequence: Synthetic polynucleotide

SEQ ID NO: 6232 - protein, 9 aa, Artificial Sequence
  Description of Artificial Sequence: Synthetic peptide
MQSIQLPLT

SEQ ID NO: 6233 - DNA, 351 bp, Artificial Sequence
  Description of Artificial Sequence: Synthetic polynucleotide
tgcagctggtgcagtctggggctgaggtgaagaagcctgggtcctcggtgaaggtctcctgcaaggcttctggaggcatcttcagcaactatgctatcaactgggtgcgacaggcccctggacaagggcttgagtggatgggacggatcatccctttctttggtacaccagactacgcacagaagttcctgggcagagtctcgattaccgcggacgattccacgagcacaggctacatggagctgagcagcctgagatctgaggacacggccgtctattactgtgcgagagacggagggactacttttcttgactactggggccagggaaccctggtcaccgtctcctcag

SEQ ID NO: 6234 - DNA, 355 bp, Artificial Sequence; identical to SEQ ID NO: 3509
  Description of Artificial Sequence: Synthetic polynucleotide

SEQ ID NO: 6235 - protein, 11 aa, Artificial Sequence
  Description of Artificial Sequence: Synthetic peptide
ARDGGTTFLDY

SEQ ID NO: 6236 - DNA, 329 bp, Artificial Sequence
  Description of Artificial Sequence: Synthetic polynucleotide
gatgacccagactccagtctccctgtccgtcacccctggacagccggcctccatctcctgcaagtctagtcagagcctccttcatagagatggaaagacctatttgtattggtacgtgcagaagccaggccagcctccacagctcctgatctatgaagtttccaaccggttgtctggagtgccagataggttcagtggcagcgggtcagggacagatttcacactgaaaatcagccgggtggaggctgaggatgttggggtttattactgcatggaaagtatacagcttcctctcactttcggcggagggaccaaggtggagatcaaac

SEQ ID NO: 6237 - DNA, 337 bp, Artificial Sequence; identical to SEQ ID NO: 3512
  Description of Artificial Sequence: Synthetic polynucleotide

SEQ ID NO: 6238 - protein, 9 aa, Artificial Sequence
  Description of Artificial Sequence: Synthetic peptide
MESIQLPLT

SEQ ID NO: 6239 - DNA, 375 bp, Artificial Sequence
  Description of Artificial Sequence: Synthetic polynucleotide
tgcagctggtgcagtctggggctgaggtgaagaagcctgggtcgtcggtgaaggtctcctgcaaggcttctggaggcaccttcagtagccaggctatcacctgggtgcgacaggcccctggacaagggcttgagtggatgggagtgttcatccctatcttcggtacagcaaactacgcacagaagttccagggcagagtcacaattaccgcggacgaatccacgagcacagcctatatggagctgaacagcctgagatctgaggacacggccgtgtattactgtacgagagaaggtggtggatacgtctctggttatgggggtggatcctactttgactactggggccagggaaccctggtcaccgtctcctcag

SEQ ID NO: 6240 - DNA, 379 bp, Artificial Sequence; identical to SEQ ID NO: 3377
  Description of Artificial Sequence: Synthetic polynucleotide

SEQ ID NO: 6241 - protein, 19 aa, Artificial Sequence
  Description of Artificial Sequence: Synthetic peptide
TREGGGYVSGYGGGSYFDY

SEQ ID NO: 6242 - DNA, 305 bp, Artificial Sequence
  Description of Artificial Sequence: Synthetic polynucleotide
cctggctgtgtctctgggcgagagggccaccatcaactgcaagtccagccagagtgttttgtacagcaataagaactacttagcttggtaccaggtcaaaccaggacagcctcctaggctgctcatttactgggcatctacccgggaatccggggtccctgaccgattcagtggcagcgggtctgggacagatttcactctcaccatcagcagcctgcaggctgaagatgtggcagtttattactgtcagcaatattataatactcccgtcaccttcggccaagggacacgactggagattaaac

SEQ ID NO: 6243 - DNA, 334 bp, Artificial Sequence; identical to SEQ ID NO: 3380
  Description of Artificial Sequence: Synthetic polynucleotide

SEQ ID NO: 6244 - protein, 9 aa, Artificial Sequence
  Description of Artificial Sequence: Synthetic peptide
QQYYNTPVT

SEQ ID NO: 6245 - DNA, 364 bp, Artificial Sequence
  Description of Artificial Sequence: Synthetic polynucleotide
gtgcagctggtgcagtctggggctgaggtgaagaagcctgggtcctcggtgagggtctcctgcaaggtttctggagacaccttcagcaactatgctatcagctgggtgcgacaggcccctggacaagggcttgagtggatgggggggatcatccctatgtttgggacaacaacctacggacagaagttcaaggccagagtcacgattaccgcggacgaatcgacgagcacagcctatgtggaattgaacagcctgacatctgaagacacggccatgtattactgtgcgagagggggcctaaggatggcaacaatttctacttacgcgcactgggggcagggaaccctgatcaccgtctcttcag

SEQ ID NO: 6246 - DNA, 367 bp, Artificial Sequence; identical to SEQ ID NO: 4643
  Description of Artificial Sequence: Synthetic polynucleotide

SEQ ID NO: 6247 - protein, 15 aa, Artificial Sequence
  Description of Artificial Sequence: Synthetic peptide
ARGGLRMATISTYAH

SEQ ID NO: 6248 - DNA, 333 bp, Artificial Sequence
  Description of Artificial Sequence: Synthetic polynucleotide
  modified_base (4)..(9): a, c, t, g, unknown or other
  modified_base (11)..(11): a, c, t, g, unknown or other
cccnnnnnncngtctccctggctgtgtctctgggcgggagggccaccctcaactgcaagtccagccagagtgttttaaacacctccaacaataaaaactacttagggtggtaccagcagaagccaggacagcctcctaggctgctcattaactgggcctcaacccgggaatcgggggtccctgaccgattcagtggcagcgggtccgggacagatttcactctcaccatcatcagggtgcaggctgaagatgtgggagtttattactgtcagcaattttatcgtactcctcaagcgatcaccttcggccaagggacacgactggagattaaac

SEQ ID NO: 6249 - DNA, 346 bp, Artificial Sequence; identical to SEQ ID NO: 4676
  Description of Artificial Sequence: Synthetic polynucleotide

SEQ ID NO: 6250 - protein, 11 aa, Artificial Sequence
  Description of Artificial Sequence: Synthetic peptide
QQFYRTPQAIT

SEQ ID NO: 6251 - DNA, 364 bp, Artificial Sequence
  Description of Artificial Sequence: Synthetic polynucleotide
gtgcagctggtgcagtctggggctgaggtgaagaagcctgggtcctcggtgaaggtctcctgcaaggcttctggaggcaccttcagcaactatgctatcagttgggtgcgacaggcccctggacaagggcttgagtggatgggagggatcatccctatgtttggtacaacaacctacggacagaagtttcagggcagagtcacgattaccgcggacgaatccacgagcacagcttacatggagctgagcagcctgagatctgaggacacggccgtatattactgtgcgagaggggggctaaggatggctacaatttctacttacgcgcactggggccagggaaccctggtcaccgtctcctcag

SEQ ID NO: 6252 - DNA, 367 bp, Artificial Sequence
  Description of Artificial Sequence: Synthetic polynucleotide
caggtgcagctggtgcagtctggggctgaggtgaagaagcctgggtcctcggtgaaggtctcctgcaaggcttctggaggcaccttcagcaactatgctatcagttgggtgcgacaggcccctggacaagggcttgagtggatgggagggatcatccctatgtttggtacaacaacctacggacagaagtttcagggcagagtcacgattaccgcggacgaatccacgagcacagcttacatggagctgagcagcctgagatctgaggacacggccgtatattactgtgcgagaggggggctaaggatggctacaatttctacttacgcgcactggggccagggaaccctggtcaccgtctcctcag

SEQ ID NO: 6253 - protein, 15 aa, Artificial Sequence
  Description of Artificial Sequence: Synthetic peptide
ARGGLRMATISTYAH

SEQ ID NO: 6254 - DNA, 317 bp, Artificial Sequence
  Description of Artificial Sequence: Synthetic polynucleotide
  modified_base (14)..(14): a, c, t, g, unknown or other
cctggctgtgtctntgggcgagagggccaccatcaactgcaagtccagccagagtgttttttacagctccaacaataagaactatttagcttggtaccagcagaaaccaggacagcctcctaagctgctcatttactgggcatctacccgggaatccggggtccctgaccgattcagtggcagcgggtctgggacggatttcactctcaccatcagcagcctgcaggctgaagatgtggctgtttattactgtcagcaatattatagtactcctcaagcgatcaccttcggccaagggacacgactggagattaaac

SEQ ID NO: 6255 - DNA, 346 bp, Artificial Sequence; identical to SEQ ID NO: 4742
  Description of Artificial Sequence: Synthetic polynucleotide
  modified_base (43)..(43): a, c, t, g, unknown or other

SEQ ID NO: 6256 - protein, 11 aa, Artificial Sequence
  Description of Artificial Sequence: Synthetic peptide
QQYYSTPQAIT

SEQ ID NO: 6257 - DNA, 353 bp, Artificial Sequence
  Description of Artificial Sequence: Synthetic polynucleotide
ggtccagctggtgcagtctggggctgaagtgaagaagcctgggtcctcggtgaaggtctcctgcaaggcttctggaggcaccttcagtaactttgctatcagctgggtgcgacaggcccctggacaagggcttgagtggatgggagatatcatccctgtctttgctacaccaaggtacgcacaggagttccagggcagagtcacgattaccgcggacaagtccacgagcacagcctacatggaggtgaacagcctgagatctgaggacacggccgtgtattactgtacgagagaggatggtttggggagttattatgattggggccagggaaccctggtcaccgtctcctcag

SEQ ID NO: 6258 - DNA, 355 bp, Artificial Sequence; identical to SEQ ID NO: 1403
  Description of Artificial Sequence: Synthetic polynucleotide

SEQ ID NO: 6259 - protein, 11 aa, Artificial Sequence
  Description of Artificial Sequence: Synthetic peptide
TREDGLGSYYD

SEQ ID NO: 6260 - DNA, 308 bp, Artificial Sequence
  Description of Artificial Sequence: Synthetic polynucleotide
cctgcccgtcacccctggagagccggcctccatctcctgcaggtctagtcagagcctcctgcataggaatgggcacaactatttggattggtacctgcagaagccagggcagtctccacagctcctgatctatttgggttctaatcgggcctctggggtccctgacaggttcagtggcagtggatcaggcacagattttacactgaaaatcagcagagtggaggctgaggatgttggggtctattactgcatggaagctctacaaactcctcggacttttggccaggggactaagctggagatcaaac

SEQ ID NO: 6261 - DNA, 337 bp, Artificial Sequence; identical to SEQ ID NO: 1406
  Description of Artificial Sequence: Synthetic polynucleotide

SEQ ID NO: 6262 - protein, 9 aa, Artificial Sequence
  Description of Artificial Sequence: Synthetic peptide
MEALQTPRT

SEQ ID NO: 6263 - DNA, 353 bp, Artificial Sequence
  Description of Artificial Sequence: Synthetic polynucleotide
ggtccagctggtgcagtctggggctgaggtgaagaagcctgggtcctcggtgaaggtctcctgcaagtcttctggaggcaccttcaacaactttgctatcaattgggtgcgacaggcccctggacaagggcttgagtggatgggaaatatcatccctatctttggtacagcaaactacggacagaagttccaggacaaaatcacgattaccgcggacaaatccacgaccacagccaacctggagttgagcagcctgagatctgaggacacggccatatattattgtgcgagaacgggaggtttggggagtcttgacgactggggacagggaaccctggtcatcgtctcctcag

SEQ ID NO: 6264 - DNA, 355 bp, Artificial Sequence; identical to SEQ ID NO: 1559
  Description of Artificial Sequence: Synthetic polynucleotide

SEQ ID NO: 6265 - protein, 11 aa, Artificial Sequence
  Description of Artificial Sequence: Synthetic peptide
ARTGGLGSLDD

SEQ ID NO: 6266 - DNA, 308 bp, Artificial Sequence
  Description of Artificial Sequence: Synthetic polynucleotide
cctgcccgtcacccctggagagccggcctccatctcctgcaggtctagtcagagcctcctgcataggagtggatacaactatttggattggtacctgcagaagccagggcagcctccacagctcctgatctatttggcttctaatcgggcctccggggtccctgacaggttcagtggcagtggatcaggcacagattttacactgaaaatcagcagagtggaggctgaagatgttggggtttattactgcatgcaagctctacaaactccccacacttttggccaggggaccaagctggagatcaaac

SEQ ID NO: 6267 - DNA, 337 bp, Artificial Sequence; identical to SEQ ID NO: 1562
  Description of Artificial Sequence: Synthetic polynucleotide

SEQ ID NO: 6268 - protein, 9 aa, Artificial Sequence
  Description of Artificial Sequence: Synthetic peptide
MQALQTPHT

SEQ ID NO: 6269 - DNA, 350 bp, Artificial Sequence
  Description of Artificial Sequence: Synthetic polynucleotide
ggtccagctggtgcagtctggggctgaggtgaagaggcctgggtcctcggtgaaggtctcctgcaaggcttctggaggcaccttcagcaactacgctatcaactgggtgcgacaggcccctggacaagggctcgagtggatgggaggaatcatcccgtcttttggaacaccaaattacgcacagaagttccagggcagagtcacgattactgcggacaaatccacgagcacagcctacatggagctgagcaggctgacatctgaggacacggccgtgttttactgtgcgagaagttcgggctggtcacttgactattggggccagggaaccttcgtcagcgtctcgtcag

SEQ ID NO: 6270 - DNA, 352 bp, Artificial Sequence; identical to SEQ ID NO: 2159
  Description of Artificial Sequence: Synthetic polynucleotide

SEQ ID NO: 6271 - protein, 10 aa, Artificial Sequence
  Description of Artificial Sequence: Synthetic peptide
ARSSGWSLDY

SEQ ID NO: 6272 - DNA, 309 bp, Artificial Sequence
  Description of Artificial Sequence: Synthetic polynucleotide
cctgccccgtcacccctggagagccggcctccatctcctgcaggtctagtcagagcctcctggatagttatggaaacaactatttggaatggtacctgcagaaggcagggcagtctccacagctcctgatctatttgggttctaatcgggcctccggggtccctgacaggttcagtggcagtggatcaggcacagattttacactgaaaatcagcagagtggaggctgaggatgttggggtttattactgcatgcaaggtctacaaactccgtacacttttggccaggggaccaagctggagatcaaac

SEQ ID NO: 6273 - DNA, 337 bp, Artificial Sequence; identical to SEQ ID NO: 2162
  Description of Artificial Sequence: Synthetic polynucleotide

SEQ ID NO: 6274 - protein, 9 aa, Artificial Sequence
  Description of Artificial Sequence: Synthetic peptide
MQGLQTPYT

SEQ ID NO: 6275 - DNA, 340 bp, Artificial Sequence
  Description of Artificial Sequence: Synthetic polynucleotide
ggaggcgtggtccagcctgggaggtccctgagactctcctgtgcagcctctggattcaccttcgttagctatggaatgcactgggtccgccaggctccaggcaaggggctggagtgggtggcggctatatcatatgatggaagtgataaacactatgcagactccgtgaagggccgattcaccatctccagagacaattccaagaacacactgtatctgcaattgaacagcctgagagttgaagacacggctgtttattactgtgcgaagggccctggaaattattatgttcgcttctttgaccactggggccagggaatcctggtcaccgtctcctcag

SEQ ID NO: 6276 - DNA, 364 bp, Artificial Sequence; identical to SEQ ID NO: 2291
  Description of Artificial Sequence: Synthetic polynucleotide

SEQ ID NO: 6277 - protein, 14 aa, Artificial Sequence
  Description of Artificial Sequence: Synthetic peptide
AKGPGNYYVRFFDH

SEQ ID NO: 6278 - DNA, 345 bp, Artificial Sequence
  Description of Artificial Sequence: Synthetic polynucleotide
ccggttcctggtcccagtctgtgctgactcagcctgcctccgtgtctgggtctcctggacagtcgatcaccatctcctgcactggaaccagcagtgacgttggtgcttatgattatgtctcctggtaccaacaacacccaggcaaagcccccaaactcatcatttatgatgtcggtaatcggccctctgggatttctaatcgcttctctggctccaagtctggcaacacggcctccctgaccatctctgggctccagactgaggacgaggctggatattactgcagctcatctacaagcaacttcactccgctgttcggcggagggaccaagctgaccgtcctag

SEQ ID NO: 6279 - DNA, 331 bp, Artificial Sequence; identical to SEQ ID NO: 2294
  Description of Artificial Sequence: Synthetic polynucleotide

SEQ ID NO: 6280 - protein, 10 aa, Artificial Sequence
  Description of Artificial Sequence: Synthetic peptide
SSSTSNFTPL

SEQ ID NO: 6281 - DNA, 346 bp, Artificial Sequence
  Description of Artificial Sequence: Synthetic polynucleotide
gtgcagctggtggagtctgggggaggcgtggtccagcctgggaggtccctgagactctcctgtgaagtctctggattcaccttcagtcactatggcatgcactgggtccgccaggctccaggcaaggggctggaatgggtggcatttatatcatatgatggaagtaagaaagactatgcagagtccgtgaagggccgattcaccatctccagagacaattccaagaacacactgtatctgcaaacgaacagcgtgagagctgaggacacggctgtgtattactgtgtgaaagatctaggctggtacggcgactggggccagagaaccctggtcaccgtctcctcag

SEQ ID NO: 6282 - DNA, 349 bp, Artificial Sequence; identical to SEQ ID NO: 4217
  Description of Artificial Sequence: Synthetic polynucleotide

SEQ ID NO: 6283 - protein, 9 aa, Artificial Sequence
  Description of Artificial Sequence: Synthetic peptide
VKDLGWYGD

SEQ ID NO: 6284 - DNA, 363 bp, Artificial Sequence
  Description of Artificial Sequence: Synthetic polynucleotide
  modified_base (9)..(14): a, c, t, g, unknown or other
  modified_base (30)..(30): a, c, t, g, unknown or other
ctagtaagnnnnnngcaaccggttcctggncccagtctgtgctgactcagcctgcctccgtgtctgggtctcctggacagtcgatcaccatctcctgcactggaaccagcagtgacgttggtggttataactatgtctcctggttccaacagcacccaggcaaagcccccaaactcatgatttttgaggtcactaaccggccctcaggggtttctaatcgcttctctggctccaagtctggcaacacggcctccctgatcatctctgggctccaggctgaggacgaggctgattattactgcctctcatatacaagcagcaccacttgggtgttcggcggagggaccaagctgaccgtcctag

SEQ ID NO: 6285 - DNA, 331 bp, Artificial Sequence; identical to SEQ ID NO: 4220
  Description of Artificial Sequence: Synthetic polynucleotide

SEQ ID NO: 6286 - protein, 10 aa, Artificial Sequence
  Description of Artificial Sequence: Synthetic peptide
LSYTSSTTWV

SEQ ID NO: 6287 - DNA, 349 bp, Artificial Sequence
  Description of Artificial Sequence: Synthetic polynucleotide
gtgcagctggtggagtctgggggaggcgtggtccagcctgggaggtccctgagactctcctgtgcagcctctggattcaccttcagtaactatggcatacactgggtccgccaggctccaggccaggggctggagtgggtggcatttatatcatatgatggcactggtaaatactatgcagactccgtgaagggccgattcactatctccagagacaattccaagaacacggtgtatttgcaaatgaacagcctgagagttgaggacacggctgtgtattactgtgcgaaaggcccctatggtccttttgacgactggggccagggaaacctggtcaccgtctcctcag

SEQ ID NO: 6288 - DNA, 352 bp, Artificial Sequence; identical to SEQ ID NO: 4259
  Description of Artificial Sequence: Synthetic polynucleotide

SEQ ID NO: 6289 - protein, 10 aa, Artificial Sequence
  Description of Artificial Sequence: Synthetic peptide
AKGPYGPFDD

SEQ ID NO: 6290 - DNA, 320 bp, Artificial Sequence
  Description of Artificial Sequence: Synthetic polynucleotide
gactcagcctgcctccgtgtctgggtctcctggacagtcgatcaccatctcctgcactggaaccagcagtgacgttggtggttataactatgtctcctggtaccaacaacacccaggcaaagcccccaaactcatgatttatgaggtcagtaatcggccctcaggggtttctaatcgcttctccggctccaagtctggcaacacggcctccctgaccatctctgggctccaggctgaggacgaggctgattattactgcaactcatatacaagcaccagcacttggctgttcggcggagggaccaggctgaccgtcctag

SEQ ID NO: 6291 - DNA, 331 bp, Artificial Sequence; identical to SEQ ID NO: 4262
  Description of Artificial Sequence: Synthetic polynucleotide

SEQ ID NO: 6292 - protein, 10 aa, Artificial Sequence
  Description of Artificial Sequence: Synthetic peptide
NSYTSTSTWL

SEQ ID NO: 6293 - DNA, 346 bp, Artificial Sequence
  Description of Artificial Sequence: Synthetic polynucleotide
gagtctgggggaggcgtggtccagcctgggaggtccctgagactctcctgtgcagcctctggattcaccttcagtagctatggcatgcactgggtccgccaggctccaggcaagggtctggagtgggcggcagttatatcatatgatggaagtgataaattctatgcagactccgtgaagggccgattcaccatctccagagacaactccaagaacacgctttttctgcaaatgaacagcctgagagctgaggactcggctatctattactgtgctaagacggcgggtaacctttttggagtggttgttatctggggccagggaaccctggtcaccgtctcctcag

SEQ ID NO: 6294 - DNA, 361 bp, Artificial Sequence; identical to SEQ ID NO: 2273
  Description of Artificial Sequence: Synthetic polynucleotide

SEQ ID NO: 6295 - protein, 13 aa, Artificial Sequence
  Description of Artificial Sequence: Synthetic peptide
AKTAGNLFGVVVI

SEQ ID NO: 6296 - DNA, 364 bp, Artificial Sequence
  Description of Artificial Sequence: Synthetic polynucleotide
ctagtagcaactgcaaccggttcctgggcccagtctgtgctgactcagtcatcctctgcctctgcttccctgggatcctcggtcaggctcacctgcactctgagtagtgggcacaagagctacatcatcgcatggcatcagcagcagccagggaaggcccctcggtacttgatgaagcttgaacctggtggaagctccaacaagggaagcggggttcctgatcgcttctcaggctccagctctggggctgaccgctacctcaccatctccaacctccagtctgaggatgaggctgattattactgtcagacctgggacattaacaccctggtgctcggcggagggaccaagctgaccgtcctag

SEQ ID NO: 6297 - DNA, 334 bp, Artificial Sequence; identical to SEQ ID NO: 2276
  Description of Artificial Sequence: Synthetic polynucleotide

SEQ ID NO: 6298 - protein, 9 aa, Artificial Sequence
  Description of Artificial Sequence: Synthetic peptide
QTWDINTLV

SEQ ID NO: 6299 - DNA, 337 bp, Artificial Sequence
  Description of Artificial Sequence: Synthetic polynucleotide
ggaggcgtggtccagcctgggaggtccctgagactctcctgtgcagcctctggattcagcttcagttattatggcatgcactgggtccgccaggctccaggcaaggggctggagtgggtggcagttatatcatatgatggaagtgataaatactatacagactccgtgaagggccgattcaccatctccagagacaattccaagaacacgctgtatttgcaaatgaacagcctgagggctgaagacacggctgtctattattgtgcgaaagtcagtggcaactaccaggggccctttgactcctggggccagggaacccgggtcaccgtctcctcag

SEQ ID NO: 6300 - DNA, 361 bp, Artificial Sequence; identical to SEQ ID NO: 4319
  Description of Artificial Sequence: Synthetic polynucleotide

SEQ ID NO: 6301 - protein, 13 aa, Artificial Sequence
  Description of Artificial Sequence: Synthetic peptide
AKVSGNYQGPFDS

SEQ ID NO: 6302 - DNA, 322 bp, Artificial Sequence
  Description of Artificial Sequence: Synthetic polynucleotide
  modified_base (58)..(58): a, c, t, g, unknown or other
  modified_base (186)..(186): a, c, t, g, unknown or other
actcagtcgtcctctgcctctgcttccctgggatcctcggtcaagctcacctgcactntgagcagcggtcacagtcgccacatcgtcacatggcatcagcagcagccagggaaggcccctcggtttctgatgaaggttgaaagtagtggaagctacaacaaggggagcggagttcttgatcgcttntcaggctccagttctggggctgaccgctacctcaccatctccaacctccagtctgaagatgaggctgattattactgtgagacctgggacactcacactcgcgtgtttggcggagggaccaagctgaccgtcctag

SEQ ID NO: 6303 - DNA, 334 bp, Artificial Sequence; identical to SEQ ID NO: 4322
  Description of Artificial Sequence: Synthetic polynucleotide
  modified_base (70)..(70): a, c, t, g, unknown or other
  modified_base (198)..(198): a, c, t, g, unknown or other

SEQ ID NO: 6304 - protein, 9 aa, Artificial Sequence
  Description of Artificial Sequence: Synthetic peptide
ETWDTHTRV

SEQ ID NO: 6305 - DNA, 348 bp, Artificial Sequence
  Description of Artificial Sequence: Synthetic polynucleotide
tggagtctgggggaggcgtggtccagccggggaggtccctgagactctcctgtgcagcctctggattcaccttcagtagttatggcatgcactgggtccgccaggctccaggcaaggggctggagtgggtggcagttatattatatgatggaagtactaaattctatgcggactctgtgaagggccgattcaccatctccagagacaattccaagaacacactatatctgcaaatgaacagcctgagaggtgaggacacggctgtctactactgtgcgaaatccttgggctcgcttatggggtcctttgactactggggccagggaaccctggtcaccgtctcctcag

SEQ ID NO: 6306 - DNA, 361 bp, Artificial Sequence; identical to SEQ ID NO: 4223
  Description of Artificial Sequence: Synthetic polynucleotide

SEQ ID NO: 6307 - protein, 13 aa, Artificial Sequence
  Description of Artificial Sequence: Synthetic peptide
AKSLGSLMGSFDY

SEQ ID NO: 6308 - DNA, 322 bp, Artificial Sequence
  Description of Artificial Sequence: Synthetic polynucleotide
gactcagtcatcctctgcctctgcatccctgggatcctcggtcaggctcacctgcactctggacagtggacacgaaaggtacatcgtcgcatggcatcagcagcagccagggaaggcccctcggtacttgatgaagcttgaaggtggtgaaagctacaacaaggggaacggtgttcctgatcgcttctcaggctccagctctggggctgaccgctacctcaccatctccaacctccagcctgaggatgaggctgattattactgtgagacctgggacagtaacactaaagtgttcggcggagggaccaagctgaccgtccta

SEQ ID NO: 6309 - DNA, 333 bp, Artificial Sequence; identical to SEQ ID NO: 4226
  Description of Artificial Sequence: Synthetic polynucleotide

SEQ ID NO: 6310 - protein, 9 aa, Artificial Sequence
  Description of Artificial Sequence: Synthetic peptide
ETWDSNTKV

SEQ ID NO: 6311 - DNA, 348 bp, Artificial Sequence
  Description of Artificial Sequence: Synthetic polynucleotide
agtctgggggaggcgtagtccagcctgggaggtccctgagactctcctgtgcagcctctggattcaccttcagtagctttggcatgcactgggtccgccaggctccaggcaaggggctggactgggtggcagttatatcaaatgatggaaataataaagagtatggagactccgtgaagggccgattcaccatctccagagacaattccaagaacacgctgtatctggaaatgaacagcctgagacctgaggacacggctgtgtaccattgtgcgaaggatcatgcgcagtggatagacaactggttcgacccctggggccagggaaccctggtcaccgtctcctcag

SEQ ID NO: 6312 - DNA, 364 bp, Artificial Sequence; identical to SEQ ID NO: 1955
  Description of Artificial Sequence: Synthetic polynucleotide

SEQ ID NO: 6313 - protein, 14 aa, Artificial Sequence
  Description of Artificial Sequence: Synthetic peptide
AKDHAQWIDNWFDP

SEQ ID NO: 6314 - DNA, 291 bp, Artificial Sequence
  Description of Artificial Sequence: Synthetic polynucleotide
tgtctgtgtctccaggggaaagagccaccctctcctgcagggccagtcagagtgttaccagcaacttagcctggtatcagcagaaagctggccaggctcccaggctcctcatccatggtacagccaccagggccactggcatcccagccaggttcagtggcagtgggtctgagacagagttcactctcaccatcagcagcctgcagtctgaagattttgcagtttattactgtcagcaatataataactggccgctcactttcggcggagggaccaaggtggagatcaaac

SEQ ID NO: 6315 - DNA, 322 bp, Artificial Sequence; identical to SEQ ID NO: 1958
  Description of Artificial Sequence: Synthetic polynucleotide

SEQ ID NO: 6316 - protein, 9 aa, Artificial Sequence
  Description of Artificial Sequence: Synthetic peptide
QQYNNWPLT

SEQ ID NO: 6317 - DNA, 361 bp, Artificial Sequence
  Description of Artificial Sequence: Synthetic polynucleotide
gtgcagctggtggagtctgggggaggcgtggtccagcctgggagttcactgagactctcctgtggagcctctggattcatcttcagtaattatgccatgcactgggtccgccaggctccaggcaaggggctggagtggatggcagtgatatcagatgatggagaaaatatagagtatggagactccgtgaagggccggttcaccatctccagagacaattcgaagaataggttgtatctgcaaatggacagcctgagagatgaggacacggctgtgtattactgtgcgaaagatccccgcagctgggtcgacaactggttcgacccctggggccagggaaccctggtcaccgtctcctcag

SEQ ID NO: 6318 - DNA, 364 bp, Artificial Sequence; identical to SEQ ID NO: 4037
  Description of Artificial Sequence: Synthetic polynucleotide

SEQ ID NO: 6319 - protein, 14 aa, Artificial Sequence
  Description of Artificial Sequence: Synthetic peptide
AKDPRSWVDNWFDP

SEQ ID NO: 6320 - DNA, 293 bp, Artificial Sequence
  Description of Artificial Sequence: Synthetic polynucleotide
cctgtctgtgtctccgggggaaagagccaccctctcctgcagggccagtcagagtgttaccatcaacttagcctggtaccagcagaaacctggccaggctcccaggctcctcatccatggtgcatccaccagggccactggcatcccagccaggttcagtggcagtgggtctgggacagagttcactctcaccatcagcagcctgcagtctgaagattttgcaatttattattgtcagcagtatgattactggccgctcactttcggcggagggtccaaggtggagatcaaac

SEQ ID NO: 6321 - DNA, 322 bp, Artificial Sequence; identical to SEQ ID NO: 4040
  Description of Artificial Sequence: Synthetic polynucleotide

SEQ ID NO: 6322 - protein, 9 aa, Artificial Sequence
  Description of Artificial Sequence: Synthetic peptide
QQYDYWPLT

SEQ ID NO: 6323 - DNA, 349 bp, Artificial Sequence
  Description of Artificial Sequence: Synthetic polynucleotide
gagtctgggggaggcgtggtccagcctgggaggtccctgagactctcctgtgcagcctctggattcaccttcagtagctatggcatgcactgggtccgccaggctccaggcaaggggctggagtgggtggcagttatatcatatgatggaagtaataaggactatgcagactccgtgaagggccgattcaccatctccagagacaattccaagaacacgctgtatctgcaaatgaacagcctgagagctgaggacacggctgtctattattgtgcgaaagatcccgccagctgggtagacaactggttcgacccctggggccagggaaccctggtcaccgtctcctcag

SEQ ID NO: 6324 - DNA, 364 bp, Artificial Sequence; identical to SEQ ID NO: 3683
  Description of Artificial Sequence: Synthetic polynucleotide

SEQ ID NO: 6325 - protein, 14 aa, Artificial Sequence
  Description of Artificial Sequence: Synthetic peptide
AKDPASWVDNWFDP

SEQ ID NO: 6326 - DNA, 293 bp, Artificial Sequence
  Description of Artificial Sequence: Synthetic polynucleotide
cctgtctgtgtctccaggggaaagagccaccctctcctgcagggccagtcagagtgttagcagcaacttagcctggtaccagcagaaacctggccaggctcccaggctcctcatctatggtgcatccaccagggccactggcatcccagccaggttcagtggcagtgggtctgggacagagttcactctcaccatcagcagcctgcagtctgaagattttgcagtttattactgtcagcagtataataactggccgctcactttcggcggagggaccaaggtggagatcaaac

SEQ ID NO: 6327 - DNA, 322 bp, Artificial Sequence; identical to SEQ ID NO: 3686
  Description of Artificial Sequence: Synthetic polynucleotide

SEQ ID NO: 6328 - protein, 9 aa, Artificial Sequence
  Description of Artificial Sequence: Synthetic peptide
QQYNNWPLT

SEQ ID NO: 6329 - DNA, 356 bp, Artificial Sequence
  Description of Artificial Sequence: Synthetic polynucleotide
gcagctggtggagtctgggggaggcgtggtccagcctgggaggtccctgagactctcctgtgcagcgtctggattcaccttcagtagctatgggatgcactgggtccgccaggctccaggcaaggggctggagtgggtggcagctatttggtatgacggaagtgataaatactatgcagactccgtgaggggccgattcagcatctccagagacaattccaagagcacgctgtatctgcaaatgaacagcctgagagccgaggacacggctgtgtattactgtgcgagaagcggtggtaactcctttggtgccgttgactactggggccagggaatcctggtcgccgtctccgcag

SEQ ID NO: 6330 - DNA, 361 bp, Artificial Sequence; identical to SEQ ID NO: 959
  Description of Artificial Sequence: Synthetic polynucleotide

SEQ ID NO: 6331 - protein, 13 aa, Artificial Sequence
  Description of Artificial Sequence: Synthetic peptide
ARSGGNSFGAVDY

SEQ ID NO: 6332 - DNA, 349 bp, Artificial Sequence
  Description of Artificial Sequence: Synthetic polynucleotide
accggttcctgggcccagtctgtgctgactcagtcgccctctgcctctgcctccctgggagcctcggtcaagctcacctgcactctgagcagtgggcacagcaggaacgtcatcgcatggcatcagcagcagccagagaagggccctcgatacttgatgaagtttaacagtgatggcagccacaccaagggggacgggatccctgatcgcttctcaggctccagctctggggctgagcgctacctcaccatctccagcctccaggctgaggatgaggctgactattactgtcagacctggggcactggcattctggtattcggcggagggaccaagctgaccgtcctag

SEQ ID NO: 6333 - DNA, 334 bp, Artificial Sequence; identical to SEQ ID NO: 962
  Description of Artificial Sequence: Synthetic polynucleotide

SEQ ID NO: 6334 - protein, 9 aa, Artificial Sequence
  Description of Artificial Sequence: Synthetic peptide
QTWGTGILV

SEQ ID NO: 6335 - DNA, 357 bp, Artificial Sequence
  Description of Artificial Sequence: Synthetic polynucleotide
tgcagctggtggagtctgggggaggcgtggtccagcctgggaggtccctgagactctcctgtgaagcctctgggttcaccttcattagctatggcatgcactgggtccgccaggctccaggcaaggggctggagtgggtggcaggtatatggtatgatggaagtaataaatactatgcagactccgtgaagggccgattcaccatctccagagacaattccaagaacacacagtatctacaaatgaacagcctgagagccgaggacacggctgtgtattactgtacgagagtcggtggtaactctctaggttctgttgactactggggccagggaaccctggtcaccgtctcctcag

SEQ ID NO: 6336 - DNA, 361 bp, Artificial Sequence; identical to SEQ ID NO: 1103
  Description of Artificial Sequence: Synthetic polynucleotide

SEQ ID NO: 6337 - protein, 13 aa, Artificial Sequence
  Description of Artificial Sequence: Synthetic peptide
TRVGGNSLGSVDY

SEQ ID NO: 6338 - DNA, 354 bp, Artificial Sequence
  Description of Artificial Sequence: Synthetic polynucleotide
caaccggttcctgggcccagtctgtgctgactcagtcgccctctgcctctgcctccctgggagcctcggtcaagctcacctgcactctgagcggcgggcacaacaactacgtcatcgcttggcatcagcagcaaccagagaagggccctcgttacttgatgaaggttaacagtgatggcagccacagcaagggggacgggatccctgctcgcttctcaggctccagctctggggctgagcgctacctcaccatctccagcctccagtctgaggatgaggctgactattactgtcagacctggggcactggcattcatgtggtattcggcggagggaccaagctgaccgtcctag

SEQ ID NO: 6339 - DNA, 337 bp, Artificial Sequence; identical to SEQ ID NO: 1106
  Description of Artificial Sequence: Synthetic polynucleotide

SEQ ID NO: 6340 - protein, 10 aa, Artificial Sequence
  Description of Artificial Sequence: Synthetic peptide
QTWGTGIHVV

SEQ ID NO: 6341 - DNA, 348 bp, Artificial Sequence
  Description of Artificial Sequence: Synthetic polynucleotide
tggagtctgggggaggcgtggtccagcctgggaggtccctgagactctcctgtgcagcgtctggattcagcttcggtagctatggcatgcactgggtccgccaggctccaggcaaggggctggcgtgggtggcagttatctggtatgatggaagtgataaatactatgcagactccgtgaagggccgattcaccatctccagagacaattccaagaacaccctgtatctgcaaatgaacaacctgagagccgaggacacggctgtgtattactgtgcgaggtcgaagggaaacagctatggtccatttgactactggggcccgggaaccctggtcaccgtctcctcag

SEQ ID NO: 6342 - DNA, 361 bp, Artificial Sequence; identical to SEQ ID NO: 4187
  Description of Artificial Sequence: Synthetic polynucleotide

SEQ ID NO: 6343 - protein, 13 aa, Artificial Sequence
  Description of Artificial Sequence: Synthetic peptide
ARSKGNSYGPFDY

SEQ ID NO: 6344 - DNA, 323 bp, Artificial Sequence
  Description of Artificial Sequence: Synthetic polynucleotide
gactcagtcgccctctgcctctgcctccctgggagcctcggtcaagctcacctgcactctgagcagtgggcacagcggatacgtcatcgcatggcatcagcagcacccagggaagggccctcgttacttgatggagcttaacagtgatggcagccacatcaagggggacgggatccctgatcgcttctcaggctccagttctggggctgagcgctacctcaccatctccagcctccagtctgaggatgaggctgactattactgtcagacctggggcactggcattgttcttttcggcggagggaccaagctgaccgtcctag

SEQ ID NO: 6345 - DNA, 334 bp, Artificial Sequence; identical to SEQ ID NO: 4190
  Description of Artificial Sequence: Synthetic polynucleotide

SEQ ID NO: 6346 - protein, 9 aa, Artificial Sequence
  Description of Artificial Sequence: Synthetic peptide
QTWGTGIVL

SEQ ID NO: 6347 - DNA, 360 bp, Artificial Sequence
  Description of Artificial Sequence: Synthetic polynucleotide
tggagtctgggggtggcgtggtccagcctgggaggtcgctgagactctcctgtgcagcgtcaggattcacattcactaattatggcatgcactgggtccgccaggttccaggcaaggggctggagtgggtggcagtcatatggcatgatgggagtaatgattactatccagactccttgaagggccgattcaccatctccagagacaattccaggaacacggtgtacctgcaaatgaacagcctgagagccgaggacacggctgtgtattattgtgcgagagattattgtggtcgtcacggctgcatcgacaactggttcgacccctggggccagggaaccctggtcaccgtctcctcag

SEQ ID NO: 6348 - DNA, 373 bp, Artificial Sequence; identical to SEQ ID NO: 3461
  Description of Artificial Sequence: Synthetic polynucleotide

SEQ ID NO: 6349 - protein, 17 aa, Artificial Sequence
  Description of Artificial Sequence: Synthetic peptide
ARDYCGRHGCIDNWFDP

SEQ ID NO: 6350 - DNA, 290 bp, Artificial Sequence
  Description of Artificial Sequence: Synthetic polynucleotide
cctgtctgtgtctccaggggaaagagccaccctgtcctgcagggccagtgagagtgttggcaccaacttagcctggtaccggcagaaacctggccaggctcccaggctcctcatctatggtgcatccaccagggccactggtatcccagccaggttcagtgccagtgggtctgggacagagttcactctcagcatcagcagcctgcagtctgaagattttggagtttattactgtcagcagtatgattactggcccctcactttcggcggagggaccaaggtggagatca

SEQ ID NO: 6351 - DNA, 319 bp, Artificial Sequence; identical to SEQ ID NO: 3464
  Description of Artificial Sequence: Synthetic polynucleotide

SEQ ID NO: 6352 - protein, 9 aa, Artificial Sequence
  Description of Artificial Sequence: Synthetic peptide
QQYDYWPLT

SEQ ID NO: 6353 - DNA, 360 bp, Artificial Sequence
  Description of Artificial Sequence: Synthetic polynucleotide
tggagtctgggggaggcgtggtccagcctgggaggtccctgagactctcctgtgcagcgtctggattcacgttcagtagttatggcatgcactgggtccgccaggctccaggcaaggggctggagtgggtggcagttatatggcatgatggaagtaatgactactatccagactccgtgaaggaccgattcaccatctccagagacaattccaagaacacggtgtatctgcaaatgaacagcctgagagccgaggacacggctatatattactgtgcgagagactattgtggtcgtaacggctgcatagacaactggttcgacccctggggccagggaaccctggtcaccgtctcctcag

SEQ ID NO: 6354 - DNA, 373 bp, Artificial Sequence; identical to SEQ ID NO: 181
  Description of Artificial Sequence: Synthetic polynucleotide

SEQ ID NO: 6355 - protein, 17 aa, Artificial Sequence
  Description of Artificial Sequence: Synthetic peptide
ARDYCGRNGCIDNWFDP

SEQ ID NO: 6356 - DNA, 293 bp, Artificial Sequence
  Description of Artificial Sequence: Synthetic polynucleotide
cctgtctgtgtctccaggggaaagagccaccctctcctgcagggccagtcagagtgttagcagcaacttagcctggtaccagcagaaacctggccaggctcccaggctcctcatctatggtgcatccaccagggccactggtatccctgccaggttcagtggcagtgggtctgggacagagttcactctcaccatcaacagcctgcagtctgaagattttgcagtttattactgtcagcagtatgattactggcccctcactttcggcggagggaccaaggtggagatcaaac

SEQ ID NO: 6357 - DNA, 322 bp, Artificial Sequence; identical to SEQ ID NO: 182
  Description of Artificial Sequence: Synthetic polynucleotide

SEQ ID NO: 6358 - protein, 9 aa, Artificial Sequence
  Description of Artificial Sequence: Synthetic peptide
QQYDYWPLT

SEQ ID NO: 6359 - DNA, 362 bp, Artificial Sequence
  Description of Artificial Sequence: Synthetic polynucleotide
gtggagtctgggggaggcgtggtccagcctgggaggtccctgagactctcctgtgcggcgtctggattcaccttcagtagctatggcatgcactgggtccgccaggctccaggcaaggggctggagtgggtggcagttatatggtctgatggaagtaatgaatactatccagactccgtgaagggccgattcaccatctccagagacaattccaagaagacgctgtatctccaaatgaaccgcctgagagccgaggacacggctatatatttctgtgcgagagattattgtgacaatactaactgccaaatcgacaactggttcgaccgctggggccagggaaccctggtcaccgtctcctc

SEQ ID NO: 6360 - DNA, 374 bp, Artificial Sequence; identical to SEQ ID NO: 3863
  Description of Artificial Sequence: Synthetic polynucleotide

SEQ ID NO: 6361 - protein, 18 aa, Artificial Sequence
  Description of Artificial Sequence: Synthetic peptide
ARDYCDNTNCQIDNWFDR

SEQ ID NO: 6362 - DNA, 293 bp, Artificial Sequence
  Description of Artificial Sequence: Synthetic polynucleotide
cctgtctgtgtctccaggggaaagagccaccctctcctgcagggccagtcagagtgttagcagcaacttagcctggtaccagcagaaacctggccaggctcccaggctcctcatctatggcgcttcaaccagggccactggtatcccagccaggttcagtggcagtgggtctgggacagaattcactctcaccatcagcagcctgcagtctgaagattttgcagtttattcctgtcagcagtatgattactggcctctcactttcggcggagggaccaaggtggagatcaaac

SEQ ID NO: 6363 - DNA, 322 bp, Artificial Sequence; identical to SEQ ID NO: 3866
  Description of Artificial Sequence: Synthetic polynucleotide

SEQ ID NO: 6364 - protein, 9 aa, Artificial Sequence
  Description of Artificial Sequence: Synthetic peptide
QQYDYWPLT

SEQ ID NO: 6365 - DNA, 345 bp, Artificial Sequence
  Description of Artificial Sequence: Synthetic polynucleotide
agtctgggggaggcttagtacgccctggggggtccctgagactctcctgttcagcctctgggttcacctttaagacttatagcatgaactgggtccgccaggctccagggaaggggctggagtggcttgcatacattagtagtggcagtacttccatgtaccacgcagactctctgcagggccggttcaccatctccagagacgatgccaagaactcactgtatctgcaaatgaacagcctgggagccgaggacacggctgtctattactgtgcgagagaacatactagtcgttatgccgtctttgactactggggccagggaatcctggtcgccgtctcctcag

SEQ ID NO: 6366 - DNA, 361 bp, Artificial Sequence; identical to SEQ ID NO: 1511
  Description of Artificial Sequence: Synthetic polynucleotide

SEQ ID NO: 6367 - protein, 13 aa, Artificial Sequence
  Description of Artificial Sequence: Synthetic peptide
AREHTSRYAVFDY

SEQ ID NO: 6368 - DNA, 296 bp, Artificial Sequence
  Description of Artificial Sequence: Synthetic polynucleotide
cctgtctgcatctgtaggagacagagtcaccatcacttgccgggccagtcaaaatattcgtagttggttggcctggtatcagcagaaaccaggcaaagcccctaagctcctgatctataaggcgtctactttagaaagtggggtcccatccaggttcagcggcagtggatctgggacagaattcactctcaccatcagcagcctgcagcctgatgattctgcaacttattactgccaacagcataatactttttccgcgctcactttcggcggagggtcaaaggtggagatcaaac

SEQ ID NO: 6369 - DNA, 325 bp, Artificial Sequence; identical to SEQ ID NO: 1514
  Description of Artificial Sequence: Synthetic polynucleotide

SEQ ID NO: 6370 - protein, 10 aa, Artificial Sequence
  Description of Artificial Sequence: Synthetic peptide
QQHNTFSALT

SEQ ID NO: 6371 - DNA, 358 bp, Artificial Sequence
  Description of Artificial Sequence: Synthetic polynucleotide
gtgcagctggtggagtctgggggaggcttggtccagcctggggggtccctgagactctcctgtgcagtctctggactctctttcggtgaccataccatgaactgggtccgccaggctccagggaagggactggagtgggttgcctacattagttctactagtagtgccatatactacgcagcctctgtggagggccgattcaccgtttccagagacgatgccaagaactcactgtatctgcaaatgaacagcctgagagccgaggacacggctgtttattactgtgcgagagaacatagtagtcattactccgtctttgactactggggccagggaaccctggtcaccgtctcctcag

SEQ ID NO: 6372 - DNA, 361 bp, Artificial Sequence; identical to SEQ ID NO: 1601
  Description of Artificial Sequence: Synthetic polynucleotide

SEQ ID NO: 6373 - protein, 13 aa, Artificial Sequence
  Description of Artificial Sequence: Synthetic peptide
AREHSSHYSVFDY

SEQ ID NO: 6374 - DNA, 296 bp, Artificial Sequence
  Description of Artificial Sequence: Synthetic polynucleotide
cctgtctgcctctgtaggagacagagtcaccatcacttgtcgggccagtcagagtattagtcgctggttggcctggtatcagcagaaaccagggaaagcccctaagctcctgatctataaggcgtctactttagaaagtggggtcccatcaaggttcagcggcagtggatctgggacagaattcactctcaccatcagcagcctgcagcctgatgattttgcaacttattactgccagcagtttaatactttttccgcgctcactttcggcggagggaccaaggtggagatcaaac

SEQ ID NO: 6375 - DNA, 325 bp, Artificial Sequence; identical to SEQ ID NO: 1604
  Description of Artificial Sequence: Synthetic polynucleotide

SEQ ID NO: 6376 - protein, 10 aa, Artificial Sequence
  Description of Artificial Sequence: Synthetic peptide
QQFNTFSALT

SEQ ID NO: 6377 - DNA, 342 bp, Artificial Sequence
  Description of Artificial Sequence: Synthetic polynucleotide
agtctgggggagggttgggacggcctggggggtccctgagcctctcctgtgcagcctctggattcaccttcagtagtaatagcatgaactgggtccgccaggctccagggaaggggcttcagtgggttgcatacatcagtagtggtagtactgacatttactactcagaggctgtgaagggccgattcaccatctccagagacgatggcaagaactcactgtatctgcaaatgaacagcctgagagtcgacgacacggctatatattactgtgtgactgagactaggagttattccttttttcaacactggggccagggaagcctggtcaccgtctcctcag

SEQ ID NO: 6378 - DNA, 358 bp, Artificial Sequence; identical to SEQ ID NO: 2921
  Description of Artificial Sequence: Synthetic polynucleotide

SEQ ID NO: 6379 - protein, 12 aa, Artificial Sequence
  Description of Artificial Sequence: Synthetic peptide
VTETRSYSFFQH

SEQ ID NO: 6380 - DNA, 293 bp, Artificial Sequence
  Description of Artificial Sequence: Synthetic polynucleotide
  modified_base (79)..(79): a, c, t, g, unknown or other
ctgtctgcatctgtgggagacaaagtcaccatcacttgccgggccagtcagaatattcgtacttggttggcctggtatnagcagaaaccagggaaagcccctaacctcctgatctatcaggcgtctagtttagaaagtggggtcccatcaaggttcagcggcagtggatctgggacaacattcactctcaccatcagcagcctgcagcctgatgatattggaacttatttctgccaacagtataatactttttctgcgctcactttcggcggggggaccaaggtggagatcaa

SEQ ID NO: 6381 - DNA, 323 bp, Artificial Sequence; identical to SEQ ID NO: 2924
  Description of Artificial Sequence: Synthetic polynucleotide
  modified_base (109)..(109): a, c, t, g, unknown or other

SEQ ID NO: 6382 - protein, 10 aa, Artificial Sequence
  Description of Artificial Sequence: Synthetic peptide
QQYNTFSALT

SEQ ID NO: 6383 - DNA, 342 bp, Artificial Sequence
  Description of Artificial Sequence: Synthetic polynucleotide
agtctgggggaaggttggtacagcctggagggtccctgagactctcctgtgcagcctctggattcaccttcagtagttatgaaatgaactgggtccgccaggctccagggaaggggctggagtgggtttcattcattagtgatactagtagtgacatacactacgcagactctgtgaagggccgattcaccatctccagagacaacgccaagaactcagtgtatttgcaaatgaacagtctgagagccgcggacacggctctttattactgtgcgagaagtagagagaactacaatgtgtttgaccagtggggccagggaacccttgtcaccgtctcctcag

SEQ ID NO: 6384 - DNA, 358 bp, Artificial Sequence; identical to SEQ ID NO: 647
  Description of Artificial Sequence: Synthetic polynucleotide

SEQ ID NO: 6385 - protein, 12 aa, Artificial Sequence
  Description of Artificial Sequence: Synthetic peptide
ARSRENYNVFDQ

SEQ ID NO: 6386 - DNA, 296 bp, Artificial Sequence
  Description of Artificial Sequence: Synthetic polynucleotide
cctgtctgcatctgtaggagacagagtcaccatcacttgccgggccagtcagagtattagtaggtggttggcctggtatcagcagaaaccagggaaagcccctaaactcctgatctataaggcgtctagttcagaaagtggggtcccatcaaggttcagcggcagtggatctgggacagaattcactctcaccatcagcagcctgcagcctgatgattttgcaacttattactgccaacagtataatacttattcccggatcaccttcggccaagggacacgactggagattaaac

SEQ ID NO: 6387 - DNA, 325 bp, Artificial Sequence; identical to SEQ ID NO: 650
  Description of Artificial Sequence: Synthetic polynucleotide

SEQ ID NO: 6388 - protein, 10 aa, Artificial Sequence
  Description of Artificial Sequence: Synthetic peptide
QQYNTYSRIT

SEQ ID NO: 6389 - DNA, 345 bp, Artificial Sequence
  Description of Artificial Sequence: Synthetic polynucleotide
tggagtctgggggacgcttagtacagcctggagggtccctgagactctcctgtgcagcctctggattcattttcagtaattatgaaatgaactgggtccgccaggctccaggaaaggggctcgagtggctttcatacattagtgacagtggtagtgacatatattacgcaggctctgtgcagggccgattcaccatctccagagacaacgccaagaattcattgtatctggagattagcagtctgagagccgaggacacggctgtttattactgtgcgagagcaagagatcactacaatttgtttgactactggggccagggaaccctggtcatcgtctcctcag

SEQ ID NO: 6390 - DNA, 358 bp, Artificial Sequence; identical to SEQ ID NO: 755
  Description of Artificial Sequence: Synthetic polynucleotide

SEQ ID NO: 6391 - protein, 12 aa, Artificial Sequence
  Description of Artificial Sequence: Synthetic peptide
ARARDHYNLFDY

SEQ ID NO: 6392 - DNA, 296 bp, Artificial Sequence
  Description of Artificial Sequence: Synthetic polynucleotide
cctgtctgcatctgtgggagacagagtcaccatcacttgtcgggccagtcagtatattagtaagtggttggcctggtatcagcagaaaccagggaaagcccctaaactcctgatctataaggcgtcttctttagaaagtggggtctcatcaaggttcagcggcagtggatctgggacagagttcactctcaccatcagcagcctgcagcctgatgattctgcaacttattactgccagcaatataatactttttcccggatcaccttcggccaagggacacgactggagattaaac

SEQ ID NO: 6393 - DNA, 325 bp, Artificial Sequence; identical to SEQ ID NO: 758
  Description of Artificial Sequence: Synthetic polynucleotide

SEQ ID NO: 6394 - protein, 10 aa, Artificial Sequence
  Description of Artificial Sequence: Synthetic peptide
QQYNTFSRIT

SEQ ID NO: 6395 - DNA, 345 bp, Artificial Sequence
  Description of Artificial Sequence: Synthetic polynucleotide
tggagtctgggggaggcttggtacaacctggagggtccctgagactctcgtgtgcagcctctggattcaccttcagtagtcatgaaatgaattgggtccgccaggctccagggaaggggctggagtggctttcatacattagtgatagtggtagtgacatatactacgcagactctgtgaagggccgattcaccatctccagagacaacgtcaagaattcactgtatctgcaaatgaacagcctgagagtggaggacatggctatttattactgtgtgagagcgccgggtggctacaattatcttgactactggggccagggaaccctggtcaccgtctcctcag

SEQ ID NO: 6396 - DNA, 358 bp, Artificial Sequence; identical to SEQ ID NO: 1841
  Description of Artificial Sequence: Synthetic polynucleotide

SEQ ID NO: 6397 - protein, 12 aa, Artificial Sequence
  Description of Artificial Sequence: Synthetic peptide
VRAPGGYNYLDY

SEQ ID NO: 6398 - DNA, 296 bp, Artificial Sequence
  Description of Artificial Sequence: Synthetic polynucleotide
cctgtctgcatctgtaggagacagagtcaccatcacttgccgggccagtcagagtattagtaggtgggtggcctggtatcagcagaaaccagggaaagcccctaaactcctgatctttaaggcgtccagtttacaaggtggggtcccatcaaggttcagcggcagtggatctgggacagaattcactctcaccatcagcagcctgcagcctgatgattttgcaacttattactgccaacagtataatactttttctcgggtcaccttcggccaagggacacgactggagattaaac

SEQ ID NO: 6399 - DNA, 325 bp, Artificial Sequence; identical to SEQ ID NO: 1844
  Description of Artificial Sequence: Synthetic polynucleotide

SEQ ID NO: 6400 - protein, 10 aa, Artificial Sequence
  Description of Artificial Sequence: Synthetic peptide
QQYNTFSRVT

SEQ ID NO: 6401 - DNA, 390 bp, Artificial Sequence
  Description of Artificial Sequence: Synthetic polynucleotide
gttcagctggtgcagtctggagctgaggtgaagaagcctggggcctcagtgaaggtctcctgcaaggcttctggttacacctttaccagctttggtctcaactgggtgcgacaggcccctggacaaggacttgagtggatgggatggatcagcacttacactggtaacacacgctatgcacagaagtttcagggcagagtcaccatgaccacagacacatccacgagaacagcctacatggaactgaggagcctgagatctgacgacacggccgtgtattactgtgcgacttcagcaacccaacatagcggagcagctgtccccgacggaaactactactactacgctatggacgtctggggccaagggaccacggtcagcgtctcctca

SEQ ID NO: 6402 - DNA, 393 bp, Artificial Sequence; identical to SEQ ID NO: 905
  Description of Artificial Sequence: Synthetic polynucleotide

SEQ ID NO: 6403 - protein, 24 aa, Artificial Sequence
  Description of Artificial Sequence: Synthetic peptide
ATSATQHSGAAVPDGNYYYYAMDV

SEQ ID NO: 6404 - DNA, 348 bp, Artificial Sequence
  Description of Artificial Sequence: Synthetic polynucleotide
caaccggttcctggtcccagtctgtgctgactcagccgccctcagtgtctggggccccaggtcagagggtcaccatctcctgcactgggagcagctccaacatcggggcaggttatgatgtacactggtaccagcagcttccaggaacagcccccaaagtcctcatttttggtaacaacaatcggccctcaggggtccctgaccgattctctggctccaagtctggcacctcagcctccctggccatcactgggctccaggctgacgatgaggctgattattactgccagtcctatgacaccagcctgagtgtggtattcggcggagggaccaagctgaccgtcctag

SEQ ID NO: 6405 - DNA, 331 bp, Artificial Sequence; identical to SEQ ID NO: 908
  Description of Artificial Sequence: Synthetic polynucleotide

SEQ ID NO: 6406 - protein, 10 aa, Artificial Sequence
  Description of Artificial Sequence: Synthetic peptide
QSYDTSLSVV

SEQ ID NO: 6407 - DNA, 378 bp, Artificial Sequence
  Description of Artificial Sequence: Synthetic polynucleotide
gttcagctggtgcagtctggaactgaggtgaagaagcctggggcctcagtgagggtctcctgcaaggcttctggttacacctttaccagctatggtatcagctgggtgcgtcaggcccctggacaagggcttgagtggatggggtggatcagcgtttacactggtaacacaaactatgcacagaaggtccagggcagagtcaccttgaccacagacacatccacgagcacagtctacatggagctgaggagcctgagatctgacgacacggccgtgtattactgtgcgagggcgggggctggtataccagcaggtgggaactactactactacggtatggacgtctggggccaagggaccacggtcaccgtctcctca

SEQ ID NO: 6408 - DNA, 381 bp, Artificial Sequence; identical to SEQ ID NO: 2279
  Description of Artificial Sequence: Synthetic polynucleotide

SEQ ID NO: 6409 - protein, 20 aa, Artificial Sequence
  Description of Artificial Sequence: Synthetic peptide
ARAGAGIPAGGNYYYYGMDV

SEQ ID NO: 6410 - DNA, 346 bp, Artificial Sequence
  Description of Artificial Sequence: Synthetic polynucleotide
  modified_base (13)..(13): a, c, t, g, unknown or other
accggttcctggncccagtctgtgctgactcagccgccctcagtgtctggggccccagggcagaggatcaccatctcctgcactgggagcagctccaacatcggggcaggttatgatgtacactggtaccagcagcttccaggaacagcccccaaactcctcatctatggtgacagcaatcggccctcaggggtccctgaccgattctctggctccaagtctggcacctcagcctccctggccatcactgggctccaggctgaggatgaggctgattattactgccagtcctatgacatcaccctggctgtggtattcggcggagggaccaagctgagcgtcctag

SEQ ID NO: 6411 - DNA, 331 bp, Artificial Sequence; identical to SEQ ID NO: 2282
  Description of Artificial Sequence: Synthetic polynucleotide

SEQ ID NO: 6412 - protein, 10 aa, Artificial Sequence
  Description of Artificial Sequence: Synthetic peptide
QSYDITLAVV

SEQ ID NO: 6413 - DNA, 334 bp, Artificial Sequence
  Description of Artificial Sequence: Synthetic polynucleotide
tctggggctgaggtgaagaagcctggggcctcagtgaaggtctcctgcaaggcttctggatacaccttcaccggccactatatgcactgggtgcgacaggtccctggacaagggcttgagtggatgggatggatcaaccctaatagaggcacaaactatgcacagaagtttgagggcagggtcaccatgaccagggacacgtccatcagcacattttacatggaactgagcagactgagatctgacgactcggccgtgtatttctgtgcgagagataacagtgggagctacaatgactactggggccagggaaccctggtcaccgtctcctcag

SEQ ID NO: 6414 - DNA, 352 bp, Artificial Sequence; identical to SEQ ID NO: 1091
  Description of Artificial Sequence: Synthetic polynucleotide

SEQ ID NO: 6415 - protein, 11 aa, Artificial Sequence
  Description of Artificial Sequence: Synthetic peptide
ARDNSGSYNDY

SEQ ID NO: 6416 - DNA, 348 bp, Artificial Sequence
  Description of Artificial Sequence: Synthetic polynucleotide
caaccggttcctggtcccagtctgtgctgactcagcctgcctccctgtctgggtctcctggacagtcgatcaccatctcctgcactggaaccagcagtgatgttggaaattataaccttgtctcctggtaccaacaccacccaggcaaagcccccaaactcctgatttatgaggtcaataagcggccgtcaggggtttctaatcgcttctctggctccaagtctggcaacacggcctccctgacaatctctgggctccaggctgaggacgaggctgattattactgctgctcatatgcaagtagtggcactcgggtgttcggcggagggaccaaggtgaccgtcctag

SEQ ID NO: 6417 - DNA, 331 bp, Artificial Sequence; identical to SEQ ID NO: 1094
  Description of Artificial Sequence: Synthetic polynucleotide

SEQ ID NO: 6418 - protein, 10 aa, Artificial Sequence
  Description of Artificial Sequence: Synthetic peptide
CSYASSGTRV

SEQ ID NO: 6419 - DNA, 352 bp, Artificial Sequence
  Description of Artificial Sequence: Synthetic polynucleotide
gtgcagctggtgcagtctggggctgaggtgaagaggcctggggcctcagtgaaggtctcctgcaagacttctgggtacaccttcaccggctactatgtgcactgggtgcgacaggcccctggacaagggcttgagtggatgggatggatcaaccctaacaatggtggcacaaaatatgcacagaactttcagggcagggtcaccatgaccagggactcgtccatcggcacattcttcatggagttgagcagactgagatctgatgacacggccttgtattactgtgcgagggatggtcatatggtctaccttgactactggggccagggaaccccggtcaccgtctcctcag

SEQ ID NO: 6420 - DNA, 355 bp, Artificial Sequence; identical to SEQ ID NO: 2195
  Description of Artificial Sequence: Synthetic polynucleotide

SEQ ID NO: 6421 - protein, 11 aa, Artificial Sequence
  Description of Artificial Sequence: Synthetic peptide
ARDGHMVYLDY

SEQ ID NO: 6422 - DNA, 362 bp, Artificial Sequence
  Description of Artificial Sequence: Synthetic polynucleotide
  modified_base (8)..(13): a, c, t, g, unknown or other
ctagtagnnnnnngcaaccggttcctggtcccagtctgtgctgactcagcctgcctccgtgtctgggtctcctggccagtcgatcaccatctcctgcactggaaccagcagtgatgttgggaattatgactttgtctcgtggtaccaacaacacccaggcaaagcccccaaactcatgatttatgaggtcactaagcggccctcaggggtttctaatcgcttctctgggtccaagtctggcaacacggcctccctgacaatctctggactccaggctgaggacgaggctgattattactgctgctcatatgcaggtactagcacccgggtgttcggcggagggaccacgctgaccgtcctag

SEQ ID NO: 6423 - DNA, 331 bp, Artificial Sequence; identical to SEQ ID NO: 2198
  Description of Artificial Sequence: Synthetic polynucleotide

SEQ ID NO: 6424 - protein, 10 aa, Artificial Sequence
  Description of Artificial Sequence: Synthetic peptide
CSYAGTSTRV

SEQ ID NO: 6425 - DNA, 360 bp, Artificial Sequence
  Description of Artificial Sequence: Synthetic polynucleotide
cagtctgggactgaggtgaagaagcctggggcctcagtgaaggtttcctgtaaggcttctggatacaccttcactaactctgctatgcattgggtgcgccaggcccccggacaaaggcttgagtggatgggatggatcaaccctgacactggtaacacacaatattcacagaagttccagggcagagtcaccattaccagggacacatccgcgagcacagcctacatggagctgagcagcctgagatccgaagacacggctgtgtattactgtgcgagcggttcggggagtttgggcctctcttattactactacggtatggacgtctggggccaagggaccacggtcaccgtctcctca

SEQ ID NO: 6426 - DNA, 375 bp, Artificial Sequence; identical to SEQ ID NO: 1703
  Description of Artificial Sequence: Synthetic polynucleotide

SEQ ID NO: 6427 - protein, 18 aa, Artificial Sequence
  Description of Artificial Sequence: Synthetic peptide
ASGSGSLGLSYYYYGMDV

SEQ ID NO: 6428 - DNA, 370 bp, Artificial Sequence
  Description of Artificial Sequence: Synthetic polynucleotide
  modified_base (10)..(10): a, c, t, g, unknown or other
  modified_base (13)..(14): a, c, t, g, unknown or other
tctagtaggncanntgcaaccggttcctggtcccagtctgtgctgactcagccgccctcagtgtctggggccccagggcagagggtcaccatctcctgcactgggagcagctccaacatcggggcaggttatgatgtacactggtaccagcagcttccaggaacagcccccaaactcctcatctttagtgtcagcaatcggccctcaggggtccctgaccgattctctggctccaagtctggcacctcagcctccctggccatcactgggctccaggctgaggatgaggctgattattactgccagtcctatgacagcaggctgagtgccctcgtggtattcggcggagggaccaagctgaccgtcctag

SEQ ID NO: 6429 - DNA, 337 bp, Artificial Sequence; identical to SEQ ID NO: 1706
  Description of Artificial Sequence: Synthetic polynucleotide

SEQ ID NO: 6430 - protein, 12 aa, Artificial Sequence
  Description of Artificial Sequence: Synthetic peptide
QSYDSRLSALVV

SEQ ID NO: 6431 - DNA, 357 bp, Artificial Sequence
  Description of Artificial Sequence: Synthetic polynucleotide
cagtctggggctgaggtgaagaagcctggggcctcagtgaaggtttcctgcaaggcttctggatacaccttcagtaattatgctatgcattgggtgcgccaggcccccggacaaagtcttgagtggatgggatggatcaacgctgtcaatggtaacacaagatattcacagaagttccagggcagagtcaccattaccagggacacatccgcgagcacagcctacatggaactgagcagcctgagatctgaggacacagctgtgtattactgtgcgacctccctttacagtggtggggtctactactactacggtctagacgtctggggccaagggaccacggtcaccgtctcctca

SEQ ID NO: 6432 - DNA, 372 bp, Artificial Sequence; identical to SEQ ID NO: 2339
  Description of Artificial Sequence: Synthetic polynucleotide

SEQ ID NO: 6433 - protein, 17 aa, Artificial Sequence
  Description of Artificial Sequence: Synthetic peptide
ATSLYSGGVYYYYGLDV

SEQ ID NO: 6434 - DNA, 325 bp, Artificial Sequence
  Description of Artificial Sequence: Synthetic polynucleotide
actcagccgccctcagtgtctggggccccagggcagacggtcaccatcacctgcactgggagcagatccaacatcggggcaggttatgatgtacactggtaccagcagcttccaggaacagcccccaaactcctcatctttgctaacaacaatcgaccctcaggggtccctgaccgattctctggctccaggtctggcacctcagcctccctggccatcactgggctccaggctgaggatgaggctgactattactgccagtcctatgacatcaacctcaatgactatgtgaaattcggcggcgggaccaagctgaccgtcctag

SEQ ID NO: 6435 - DNA, 337 bp, Artificial Sequence; identical to SEQ ID NO: 2342
  Description of Artificial Sequence: Synthetic polynucleotide

SEQ ID NO: 6436 - protein, 12 aa, Artificial Sequence
  Description of Artificial Sequence: Synthetic peptide
QSYDINLNDYVK

SEQ ID NO: 6437 - DNA, 352 bp, Artificial Sequence
  Description of Artificial Sequence: Synthetic polynucleotide
gtgcagctggtgcagtctggggctgaggtgaagaagcctgggtcctcggtgaaggtctcctgcaagacttctggaggcaccttcagcacctatgccatcaactgggtgcgacaggcccctggacaagggtttgagtggatgggagggatcatccctgtctttggtacaccaaactacgcacagaagttccagggcagagtcacgattaacgcggacgagtccacgagcacagcctacatggagttgagaagcctgagatctgaggacacggccgtatattattgtgggagagatggagggtctggggtaccggactactggggccagggaaccctggtcaccgtctcctcag

SEQ ID NO: 6438 - DNA, 355 bp, Artificial Sequence; identical to SEQ ID NO: 1355
  Description of Artificial Sequence: Synthetic polynucleotide

SEQ ID NO: 6439 - protein, 11 aa, Artificial Sequence
  Description of Artificial Sequence: Synthetic peptide
GRDGGSGVPDY

SEQ ID NO: 6440 - DNA, 292 bp, Artificial Sequence
  Description of Artificial Sequence: Synthetic polynucleotide
cctggctgcatctgtaggagacagagtcaccatcacttgtcgggcgagtcagggcattaacaattatttagcctggtttcagcagaaaccagggaaagcccctaagtccctgatctatggtgcatccaatttgcaaagtggggtcccatcaaggttcagcggcggtggatctgggacacatttcactctcaccatcagcagcctgcagcctgaagattttgcagcttattactgccagcaatataatagttacccttggacgttcggccaagggaccaaggtggaaatcaaa

SEQ ID NO: 6441 - DNA, 321 bp, Artificial Sequence; identical to SEQ ID NO: 1358
  Description of Artificial Sequence: Synthetic polynucleotide

SEQ ID NO: 6442 - protein, 9 aa, Artificial Sequence
  Description of Artificial Sequence: Synthetic peptide
QQYNSYPWT

SEQ ID NO: 6443 - DNA, 346 bp, Artificial Sequence
  Description of Artificial Sequence: Synthetic polynucleotide
cagctggtgcagtctggggctgaggtgaagaagcctgggtcctcggtgaaggtctcctgcaaggcttctggaggcaccttcagcaactatcctattagctgggtgcgacaggcccctggacaagggcttgagtggatgggagcgatcatccctttctttggtacaccaaactacgcacggaggttccaggccagagtcacaataaccgcggacgaatctacgaccacagcctacatggagctgagcagcctgacatctgaagacacggccgtctatttctgtgcgactggtggttattacccctttgactactggggccagggaaccctggtcaccgtctcctcag

SEQ ID NO: 6444 - DNA, 352 bp, Artificial Sequence; identical to SEQ ID NO: 2819
  Description of Artificial Sequence: Synthetic polynucleotide

SEQ ID NO: 6445 - protein, 10 aa, Artificial Sequence
  Description of Artificial Sequence: Synthetic peptide
ATGGYYPFDY

SEQ ID NO: 6446 - DNA, 293 bp, Artificial Sequence
  Description of Artificial Sequence: Synthetic polynucleotide
cctgtctgcatctgtaggagacagagtcaccatcacttgtcgggcgagtcaggacattagcacttatttagcctggtttcagcagaaaccaggaaaagcccctaagtccctgatctatgatgcctctagtttgcaaagtggggtcccatcaaggttcagcggcagtggatctgggacagatttcactctcaccatcagcagcctgcagcctgaagattttgcaacttattactgccaacactataaacggtacccttggacgttcggccaggggaccaaggtggaaatcaaac

SEQ ID NO: 6447 - DNA, 322 bp, Artificial Sequence; identical to SEQ ID NO: 2822
  Description of Artificial Sequence: Synthetic polynucleotide

SEQ ID NO: 6448 - protein, 9 aa, Artificial Sequence
  Description of Artificial Sequence: Synthetic peptide
QHYKRYPWT

SEQ ID NO: 6449 - DNA, 337 bp, Artificial Sequence
  Description of Artificial Sequence: Synthetic polynucleotide
tctggggctgaggtgaagaagcctgggtcctcggtgaaggtctcctgcaaggcttctggaggcaccttcagcaactatattgtcagttgggtgcgacaggcccctggacaagggcttgagtggatgggagggagcatccctatctttggtacagcaaagttcgcccagaacttccagggcagactcacgattactgcggacgaacataccaacacagcctacatggagctgagcagcctgagatctgaggacacggccgtttactactgtgcgagagggatgggagctactggaggtgactactggggccagggaaccctggtcaccgtctcctcag

SEQ ID NO: 6450 - DNA, 355 bp, Artificial Sequence; identical to SEQ ID NO: 761
  Description of Artificial Sequence: Synthetic polynucleotide

SEQ ID NO: 6451 - protein, 11 aa, Artificial Sequence
  Description of Artificial Sequence: Synthetic peptide
ARGMGATGGDY

SEQ ID NO: 6452 - DNA, 288 bp, Artificial Sequence
  Description of Artificial Sequence: Synthetic polynucleotide
tgtctgcatctgtaggagacagagtcaccatcacttgccaggcgagtcaagacattagcaactatttaaattggtatcagcagaaaccagggaaagcccctaagctcctgatcttcgatgcatccaatttggagacaggggtcccatcaaggttcagtggaagtggctctgggacagattttactttcatcatcagcagcctgcagcctgaagatattgcaacatattactgtcaacagtatgatagtctctcacggacgttcggccaagggaccaaggtggaaatca

SEQ ID NO: 6453 - DNA, 319 bp, Artificial Sequence; identical to SEQ ID NO: 764
  Description of Artificial Sequence: Synthetic polynucleotide

SEQ ID NO: 6454 - protein, 9 aa, Artificial Sequence
  Description of Artificial Sequence: Synthetic peptide
QQYDSLSRT

SEQ ID NO: 6455 - DNA, 355 bp, Artificial Sequence
  Description of Artificial Sequence: Synthetic polynucleotide
gtgcagctggtgcagtctggggctgaggtgaagaagcctgggtcctcggtgaaactttcctgtaaggcttctggaggcactggaggcgccttcggcaactatggtttccactgggtgcgacacgcccctggacaagggcttgagtggatgggaggcataatccctgtctttggttcagcaaagttcgcacagaagttccagggcagaatcacgattaccgcggacgaatccacgaccacagtctacatgcacctgcgcggcctgagacatgaggacacggccgtgtatttctgtgcgagacagagttatgccgttgactactggggccagggaaccctggtcatcgtctcctcag

SEQ ID NO: 6456 - DNA, 358 bp, Artificial Sequence; identical to SEQ ID NO: 3371
  Description of Artificial Sequence: Synthetic polynucleotide

SEQ ID NO: 6457 - protein, 9 aa, Artificial Sequence
  Description of Artificial Sequence: Synthetic peptide
ARQSYAVDY

SEQ ID NO: 6458 - DNA, 293 bp, Artificial Sequence
  Description of Artificial Sequence: Synthetic polynucleotide
cctgtctgcatctataggagacacagtcaccatcacttgccaggcgagtcacggcataaacaacaatttgaattggtttcagcagaaaccagggaaagcccctcagctcctgatctacgatgcatccaatttggagacaggggtcccatctaggttcagtggaagtggatttgggacagagtttactttcaccatcagcagcctgcagcctgaagatattgcaacctattactgtcaacagtatgatagtctcacgtggacgttcggccaagggaccagggtggaaatcaaac

SEQ ID NO: 6459 - DNA, 322 bp, Artificial Sequence; identical to SEQ ID NO: 3374
  Description of Artificial Sequence: Synthetic polynucleotide

SEQ ID NO: 6460 - protein, 9 aa, Artificial Sequence
  Description of Artificial Sequence: Synthetic peptide
QQYDSLTWT

SEQ ID NO: 6461 - DNA, 380 bp, Artificial Sequence
  Description of Artificial Sequence: Synthetic polynucleotide
  modified_base (2)..(5): a, c, t, g, unknown or other
  modified_base (11)..(11): a, c, t, g, unknown or other
  modified_base (13)..(15): a, c, t, g, unknown or other
  modified_base (17)..(19): a, c, t, g, unknown or other
  modified_base (21)..(22): a, c, t, g, unknown or other
cnnnntaaggngnnncnnntnncaggtgcagctggtgcagtctggggctgaggtgaagaagcctgggtcctcggtgaaggtctcctgcaaggcttctggaggcaccttcaggaactatgatatcagctgggtgcgacaggcccctggacaagggcttgagtggatgggagggatcatccctgtgtttggtacaccaaagtacgcacagaagttccagggcagagtcacgattaccgcggacgaatccacgagcacagcctacatggagctgaccagcctgagatctgaagacacggccgtgtattactgtgcgagagaaggcggctacaatccttcctttgactactggggccagggaaccctggtcacagtctcctcag

SEQ ID NO: 6462 - DNA, 358 bp, Artificial Sequence; identical to SEQ ID NO: 2807
  Description of Artificial Sequence: Synthetic polynucleotide

SEQ ID NO: 6463 - protein, 12 aa, Artificial Sequence
  Description of Artificial Sequence: Synthetic peptide
AREGGYNPSFDY

SEQ ID NO: 6464 - DNA, 293 bp, Artificial Sequence
  Description of Artificial Sequence: Synthetic polynucleotide
cctgtctttgtcgccaggggaaagagccaccctctcctgcagggccagtcagagtgttagcagctacttagcctggtatcaacacaaacctggccaggctcccaggctcctcatctatgatgcatccaacagggccactggcatcccagccaggttcagtggcagtgggtctgggacagacttcactctcaccatcagcagcctagagcctgaagattttgcagtgtattactgtcagcagcgtagcaactggctggtcaccttcggccaagggacacgactggagattaaac

SEQ ID NO: 6465 - DNA, 322 bp, Artificial Sequence; identical to SEQ ID NO: 2810
  Description of Artificial Sequence: Synthetic polynucleotide

SEQ ID NO: 6466 - protein, 9 aa, Artificial Sequence
  Description of Artificial Sequence: Synthetic peptide
QQRSNWLVT

SEQ ID NO: 6467 - DNA, 355 bp, Artificial Sequence
  Description of Artificial Sequence: Synthetic polynucleotide
ggggctgaggtgaagaagcctgggtcctcgatgaaggtctcctgcaaggcttctggaggcaccttcagcaactatgcattcacctgggtgcgacaggcccctggacaaggactggagtggatgggaggaatcatccctctctttggaacactgaaatattcacagaaattcctgggcagagtcactattaccgcggacgaatccacgagcacagtctacatggagctgagcagcctgagttctgacgacacggccgtctattactgtgcgagagatcaggattatggttcggggacttattataacggtgtctttcgctactggggccagggaaccctggtcaccgtctcctcag

SEQ ID NO: 6468 - DNA, 376 bp, Artificial Sequence; identical to SEQ ID NO: 3887
  Description of Artificial Sequence: Synthetic polynucleotide

SEQ ID NO: 6469 - protein, 18 aa, Artificial Sequence
  Description of Artificial Sequence: Synthetic peptide
ARDQDYGSGTYYNGVFRY

SEQ ID NO: 6470 - DNA, 296 bp, Artificial Sequence
  Description of Artificial Sequence: Synthetic polynucleotide
cctgtctttgtctccaggggaaagagccaccctctcctgcagggccagtcagagtgctagcatctacttagcctggtaccaacagaaacctggccaggctcccaggctcctcatctatgatgcatccaacagggccactggcatcccagccaggttcagtggcagtgggtctgggacagacttcactctcaccatcagcagcctagaacctgatgattctgcagtttattactgtcagcaacgtgccagctggcctctggtcaccttcggccaagggacacgactggagatcaaac

SEQ ID NO: 6471 - DNA, 325 bp, Artificial Sequence; identical to SEQ ID NO: 3890
  Description of Artificial Sequence: Synthetic polynucleotide

SEQ ID NO: 6472 - protein, 10 aa, Artificial Sequence
  Description of Artificial Sequence: Synthetic peptide
QQRASWPLVT

SEQ ID NO: 6473 - DNA, 337 bp, Artificial Sequence
  Description of Artificial Sequence: Synthetic polynucleotide
cagtctggggctgaggtgaagatgcctgagtcctcggtgaaggtctcctgcaaggcttctggaggcaccttcagcacctctactgtcagctgggtgcgacaggcccctggacaagggcttgagtggatgggaggaatcatccctgtttttcgtacaccaaagtacgcacagaagtttcagggcagagtcacgattaccgcggacgaatccgcgaacactgcctacatggagctgagcagcctgagatctgacgacacggccgtatattactgtacgatcgggacctatgtcgagattgactattggggccagggaaccctagtcatcgtctcctcag

SEQ ID NO: 6474 - DNA, 352 bp, Artificial Sequence; identical to SEQ ID NO: 611
  Description of Artificial Sequence: Synthetic polynucleotide

SEQ ID NO: 6475 - protein, 10 aa, Artificial Sequence
  Description of Artificial Sequence: Synthetic peptide
TIGTYVEIDY

SEQ ID NO: 6476 - DNA, 295 bp, Artificial Sequence
  Description of Artificial Sequence: Synthetic polynucleotide
ctgtctttgtctccaggggaaagagccaccctctcctgcagggccagtcagagtgttagcagcgactacttaacctggtatcagcagaaacctggccaggctcccaggctcctcatctatggtgcatccaccagggccactggcatcccagacaggttcagtggcagtgggtctgggacagacttcactctcaccatcaccagactggagcctgaagattttgcagtgtattactgtcaccagtatggtacctcaccgctcactttcggcggagggaccaaagtggagatcaaac

SEQ ID NO: 6477 - DNA, 325 bp, Artificial Sequence; identical to SEQ ID NO: 614
  Description of Artificial Sequence: Synthetic polynucleotide

SEQ ID NO: 6478 - protein, 9 aa, Artificial Sequence
  Description of Artificial Sequence: Synthetic peptide
HQYGTSPLT

SEQ ID NO: 6479 - DNA, 346 bp, Artificial Sequence
  Description of Artificial Sequence: Synthetic polynucleotide
gtgcagctggtgcagtctggggctgaggtgaagaaacatgggtcctcggtgaaggtctcctgcaaggcttctggaggcaccttcagcaactatgcaatcaactgggtgcgacaggcccctggacaagggcttgagtggatgggaaaaatcatcccttcctttggaacacctcactacgcacagaagttccagggtagactcacgataaccgcggacgtctccacgaacacaggctacatggagctgaacagcctgacatctgaggacacggccgtgtattactgtgcgagaggtccctggggttgggaccactggggccagggagccctggtcaccgtctcctcag

SEQ ID NO: 6480 - DNA, 349 bp, Artificial Sequence; identical to SEQ ID NO: 2603
  Description of Artificial Sequence: Synthetic polynucleotide

SEQ ID NO: 6481 - protein, 9 aa, Artificial Sequence
  Description of Artificial Sequence: Synthetic peptide
ARGPWGWDH

SEQ ID NO: 6482 - DNA, 293 bp, Artificial Sequence
  Description of Artificial Sequence: Synthetic polynucleotide
cctgtctttgtctccaggggaaagagccaccctctcctgcggggccagtcagagtgttagcagcgactacttagcctggtaccagcagaaacctggccaggctcccaggctcctcatctatggtgcatccggcagggccactggcatcccagacaggttcagtggcagtgggtctgggacagacttcactctcaccatcagcagactgcagcctgaagattttgcagtgtattactgtcagcagtatggtagttcacccactttcggcggagggaccaaggtggagatcaaac

SEQ ID NO: 6483 - DNA, 322 bp, Artificial Sequence; identical to SEQ ID NO: 134
  Description of Artificial Sequence: Synthetic polynucleotide

SEQ ID NO: 6484 - protein, 8 aa, Artificial Sequence
  Description of Artificial Sequence: Synthetic peptide
QQYGSSPT

SEQ ID NO: 6485 - DNA, 384 bp, Artificial Sequence
  Description of Artificial Sequence: Synthetic polynucleotide
gtgcagctggtgcagtctggggctgaggtgaagaagcctgggtcctcggtgaaggtctcctgcaaggcttctgggggcaccttcagcaattatgctatcaactgggtgcgacaggcccctggaaaagggcttgagtggatgggagggaacatccctatgtttgggacaataagtaacacacagaagttccaggacagagtcacaattaccacggacgaatccacggacacagcctacatggagttgagcagcctgagatctgaggacacggccgtgtattactgtgcgagagtcaggggtaacgatttttggagtggtttcccagactacttctactacggcatggacgtctggggccaagggaccacggtcaccgtctcctca

SEQ ID NO: 6486 - DNA, 387 bp, Artificial Sequence; identical to SEQ ID NO: 2465
  Description of Artificial Sequence: Synthetic polynucleotide

SEQ ID NO: 6487 - protein, 22 aa, Artificial Sequence
  Description of Artificial Sequence: Synthetic peptide
ARVRGNDFWSGFPDYFYYGMDV

SEQ ID NO: 6488 - DNA, 302 bp, Artificial Sequence
  Description of Artificial Sequence: Synthetic polynucleotide
cctgtctttgtctccagggcaaagagccaccctctcctgcagggccagtcagagttttaacagcgactacttagcctggtatcagcagaaacctggccaggctcccaggctcctcatctatgctgcatccagcagggccactggcatcccagacaggtttagtggcagtgggtctggaacagacttcactctcaccatcagcagactggagcctgaagattttgcagtgtattactgtcagcactatggtagcccacctcccatgtacacttttggccaggggaccaagcttgagatcaaac

SEQ ID NO: 6489 - DNA, 331 bp, Artificial Sequence; identical to SEQ ID NO: 2468
  Description of Artificial Sequence: Synthetic polynucleotide

SEQ ID NO: 6490 - protein, 11 aa, Artificial Sequence
  Description of Artificial Sequence: Synthetic peptide
QHYGSPPPMYT

SEQ ID NO: 6491 - DNA, 384 bp, Artificial Sequence
  Description of Artificial Sequence: Synthetic polynucleotide
gtgcagctggtgcagtctgggactgaggtgaagatgcctgggtcctcggtgaaggtctcctgcaaggctcctagaggcaccttcagcaactatgctatcaactgggtgcggcaggcccctggacaagggctggagtggatgggagggaccatccctgtctttggtacaccaaattacgcacaggagttccagggcagagtcacctttatcgcggacgagtccacgagcacagcctacatggagctgagcggcctgaaatctgaggacacggccgtctattactgtgcgggggggcgggggtacgatttttggagtggctatccggactactactactacggtatggacgtctggggccaggggaccacggtcaccgtctcctca

SEQ ID NO: 6492 - DNA, 387 bp, Artificial Sequence; identical to SEQ ID NO: 3191
  Description of Artificial Sequence: Synthetic polynucleotide

SEQ ID NO: 6493 - protein, 22 aa, Artificial Sequence
  Description of Artificial Sequence: Synthetic peptide
AGGRGYDFWSGYPDYYYYGMDV

SEQ ID NO: 6494 - DNA, 302 bp, Artificial Sequence
  Description of Artificial Sequence: Synthetic polynucleotide
cctgtctttgtctccaggggaaagagccaccctctcctgcagggccagtcagagtattagcggcacctacttacactggtaccagcagaaacctggccaggctcccaggctcctcatctatggtgcatccaccagggccactggcatcccagacaggttcggtggcagtgggtctgggacagacttcactctcaccatcagcagactggaggctgaagattttgcagtttattactgtcagcactatggtaactcacctccggggtacacttttggccaggggaccaagctggagatcaaac

SEQ ID NO: 6495 - DNA, 331 bp, Artificial Sequence; identical to SEQ ID NO: 3194
  Description of Artificial Sequence: Synthetic polynucleotide

SEQ ID NO: 6496 - protein, 11 aa, Artificial Sequence
  Description of Artificial Sequence: Synthetic peptide
QHYGNSPPGYT

SEQ ID NO: 6497 - DNA, 352 bp, Artificial Sequence
  Description of Artificial Sequence: Synthetic polynucleotide
gtgcagctggtgcagtctggggctgagatgaagaagcctggcttttcggtgaaggtctcctgcaaggcttctggaggcattttcagcaactatgcaatcaactgggtgcgacaggcccctggacaagggcttgagtggatgggagggatcatccctgcctttggtacaccacactacgcacaaaagttccaaggcagactcacgattaccgcggacaaatcgacgagcacagcctacatggagttgaccagtctgacttccaatgacacggccctgtattactgtgcgagggcaatgggatctacagggggggactactggggccagggaaccctggtcgccgtctcctcag

SEQ ID NO: 6498 - DNA, 355 bp, Artificial Sequence; identical to SEQ ID NO: 1493
  Description of Artificial Sequence: Synthetic polynucleotide

SEQ ID NO: 6499 - protein, 11 aa, Artificial Sequence
  Description of Artificial Sequence: Synthetic peptide
ARAMGSTGGDY

SEQ ID NO: 6500 - DNA, 293 bp, Artificial Sequence
  Description of Artificial Sequence: Synthetic polynucleotide
cctgtctgcatcggtaggggacagcgtcaccatcacttgccaggcgaatcaagacattggcaactatttaaattggtatcagctcaaaccagggaaagcccctcagctcttgatcttcgatgcatccaatttggaaacaggggtcccatcaaggttcagtggacgtggatctgggacacattttaccttcaccatcagcagtctgcagcctgaagatatcgcaacatatttctgtcaacagtatcaaaatctccggtacacttttggccaggggaccaagctggagatcaaac

SEQ ID NO: 6501 - DNA, 322 bp, Artificial Sequence; identical to SEQ ID NO: 1496
  Description of Artificial Sequence: Synthetic polynucleotide

SEQ ID NO: 6502 - protein, 9 aa, Artificial Sequence
  Description of Artificial Sequence: Synthetic peptide
QQYQNLRYT

SEQ ID NO: 6503 - DNA, 350 bp, Artificial Sequence
  Description of Artificial Sequence: Synthetic polynucleotide
gcagctggtgcagtctggggctgaggtgaagaagcctgggtcctcggtgaaggtctcctgcaaggcttctggaggcaccctcaccaattatgttgtcaggtgggtgcggcaggcccctggacaaggccttgaggggatgggagggatcatccctgtctttgggacaacaaactacgcacagaagttccggggcagactcacgatcaccgcggacaaatccacgaacacagcctacatggaactgagcggcctgagatatgaggacacggccgtgtattactgtgcgcgagatttcgggggccatgggggcgcctactggggccagggaaccctggtcaccgtctcctcag

SEQ ID NO: 6504 - DNA, 355 bp, Artificial Sequence
  Description of Artificial Sequence: Synthetic polynucleotide
caggtgcagctggtgcagtctggggctgaggtgaagaagcctgggtcctcggtgaaggtctcctgcaaggcttctggaggcaccctcaccaattatgttgtcaggtgggtgcggcaggcccctggacaaggccttgaggggatgggagggatcatccctgtctttgggacaacaaactacgcacagaagttccggggcagactcacgatcaccgcggacaaatccacgaacacagcctacatggaactgagcggcctgagatatgaggacacggccgtgtattactgtgcgcgagatttcgggggccatgggggcgcctactggggccagggaaccctggtcaccgtctcctcag

SEQ ID NO: 6505 - protein, 11 aa, Artificial Sequence
  Description of Artificial Sequence: Synthetic peptide
ARDFGGHGGAY

SEQ ID NO: 6506 - DNA, 296 bp, Artificial Sequence
  Description of Artificial Sequence: Synthetic polynucleotide
cctgtctgcatctgtaggagacagagtcaccatcacttgccaggcgagtcaggacattaagtactatttaaattggtatcagcagaaaccagggaaagcccctaaactcctgatctacgatgcatccaatttggagacaggggtcccatcaaggttcagtggaagtggatctgggacagattttactttcaccatcagcagcctgcagcctgaagatgttgcaacatattactgtcaccagtatgataatctccctcgggacacttttggccaggggaccaagttggagatcaaac

SEQ ID NO: 6507 - DNA, 325 bp, Artificial Sequence; identical to SEQ ID NO: 4724
  Description of Artificial Sequence: Synthetic polynucleotide

SEQ ID NO: 6508 - protein, 10 aa, Artificial Sequence
  Description of Artificial Sequence: Synthetic peptide
HQYDNLPRDT

SEQ ID NO: 6509 - DNA, 333 bp, Artificial Sequence
  Description of Artificial Sequence: Synthetic polynucleotide
  modified_base (315)..(315): a, c, t, g, unknown or other
gtctggggctgaggtgaagaagcctgggtcctcggtgaaggtctcctgcaaggcttctggaggcgccttcatcaactatgctatccactgggtgcggcaggcccctggacaagggcttgagtggatggggcggaccatccctttttttggtacatcaaactacgcacagaagttccagggcagagtcacgatcaccgcggacaaatccacgagcacagcctacatggagctgagcagcctgagatctgaggacacggccgtgtattactgtgcgagagatggtggggcggtggctggtttaaattactggggccngggaaccctggtcaccgt

SEQ ID NO: 6510 - DNA, 350 bp, Artificial Sequence; identical to SEQ ID NO: 2351
  Description of Artificial Sequence: Synthetic polynucleotide
  modified_base (332)..(332): a, c, t, g, unknown or other

SEQ ID NO: 6511 - protein, 12 aa, Artificial Sequence
  Description of Artificial Sequence: Synthetic peptide
ARDGGAVAGLNY

SEQ ID NO: 6512 - DNA, 308 bp, Artificial Sequence
  Description of Artificial Sequence: Synthetic polynucleotide
cctgtccgtcacccctggacagccggcctccatctcttgtaagtctagtcacagcctcctgcatagagatggaaagacctattcgtactggtacctgcagaagccaggccagcctccacagctcctgatctatgaagtttccaaccggttatctggagtgccagacagattcagtggcagcgggtcagggacagatttcacactgaaaatcagccgggtggaggctgaggatgttggggtttattactgcatgcaaagtatacagtttccgtggacgttcggccaagggaccaaggtggaaatcaaac

SEQ ID NO: 6513 - DNA, 337 bp, Artificial Sequence; identical to SEQ ID NO: 2354
  Description of Artificial Sequence: Synthetic polynucleotide

SEQ ID NO: 6514 - protein, 9 aa, Artificial Sequence
  Description of Artificial Sequence: Synthetic peptide
MQSIQFPWT

SEQ ID NO: 6515 - DNA, 352 bp, Artificial Sequence
  Description of Artificial Sequence: Synthetic polynucleotide
cagctggtgcagtctggggctgaggtgacgaagcctgggtcctcggtgaaggtctcctgcaaggcttctggaggcacgttcagcaactatgatatcagttgggtgcgacaggcccctggacaagggcttgagtggatgggagggatcatccctatctttggtacaccaaactacgcacagaagttccagggcagagtcacgattaccgcggacatatccacgagcacagcctacatggaactgaggagcctgagatctgaggacacggccgtgtattactgtgcgagagatggcggagcagtggctgcttttgactactggggccagggaaccctggtcaccgtctcctcag

SEQ ID NO: 6516 - DNA, 358 bp, Artificial Sequence
  Description of Artificial Sequence: Synthetic polynucleotide
caggtgcagctggtgcagtctggggctgaggtgacgaagcctgggtcctcggtgaaggtctcctgcaaggcttctggaggcacgttcagcaactatgatatcagttgggtgcgacaggcccctggacaagggcttgagtggatgggagggatcatccctatctttggtacaccaaactacgcacagaagttccagggcagagtcacgattaccgcggacatatccacgagcacagcctacatggaactgaggagcctgagatctgaggacacggccgtgtattactgtgcgagagatggcggagcagtggctgcttttgactactggggccagggaaccctggtcaccgtctcctcag

SEQ ID NO: 6517 - protein, 12 aa, Artificial Sequence
  Description of Artificial Sequence: Synthetic peptide
ARDGGAVAAFDY

SEQ ID NO: 6518 - DNA, 308 bp, Artificial Sequence
  Description of Artificial Sequence: Synthetic polynucleotide
cctgtccgtcacccctggacagccggcctccatctcctgcaagtctagtcagagcctcctccataatgatggaaagacctatttgtattggtacctgcagaagccaggccagcctccacagctcctgatctatgaagtttccaaccggttctctggagtgccagataggttcagtggcagcgggtcagggacagatttcacactgaaaatcagccgggtggaggctgaggatgttgggttttattactgcatgcagagtatacaccttccccggacgttcggccaagggaccaaggtggaaatcaaac

SEQ ID NO: 6519 - DNA, 337 bp, Artificial Sequence; identical to SEQ ID NO: 4670
  Description of Artificial Sequence: Synthetic polynucleotide

SEQ ID NO: 6520 - protein, 9 aa, Artificial Sequence
  Description of Artificial Sequence: Synthetic peptide
MQSIHLPRT

SEQ ID NO: 6521 - DNA, 341 bp, Artificial Sequence
  Description of Artificial Sequence: Synthetic polynucleotide
ggtgcagtctggggctgaggtgaagaagcctgggtcctcggtgaaggtctcctgcaaggcttctggaggcagtttcaacaattatgctatcaactgggtgcgacaggcccctggacaagggcttgagtttgtgggaagaatcgtccctgcctttggtacagcaaactacgcaaagaaattccagggcagagtcacgattatcgcggacacatccacgagcacagcatacatggagttgaagaggctgacatctgaggacacggccgtctactactgtgcgagagatagctacgaaattttggcctactggggccagggaaccctggtcaccgtctcctcag

SEQ ID NO: 6522 - DNA, 352 bp, Artificial Sequence; identical to SEQ ID NO: 347
  Description of Artificial Sequence: Synthetic polynucleotide

SEQ ID NO: 6523 - protein, 10 aa, Artificial Sequence
  Description of Artificial Sequence: Synthetic peptide
ARDSYEILAY

SEQ ID NO: 6524 - DNA, 312 bp, Artificial Sequence
  Description of Artificial Sequence: Synthetic polynucleotide
cctgtcccgtcacaccgggacagccggcctccatctcctgcaagtctagccagagcctcctgcatcgtgacggaaagacctatttgtcttggtacctgcaaaagccaggccagcctccacagctcctgatctatgaactttccaaccgattctctggagtgccagataggttcagtggcagcgggtcagggacagatttcacactggaaatcagccgggtggaggctgacgatgttgggctttattactgcatgcaaagtataaaccttttcgaggtctctttcggcggagggaccaaggtggagatcaaac

SEQ ID NO: 6525 - DNA, 340 bp, Artificial Sequence; identical to SEQ ID NO: 350
  Description of Artificial Sequence: Synthetic polynucleotide

SEQ ID NO: 6526 - protein, 10 aa, Artificial Sequence
  Description of Artificial Sequence: Synthetic peptide
MQSINLFEVS

SEQ ID NO: 6527 - DNA, 355 bp, Artificial Sequence
  Description of Artificial Sequence: Synthetic polynucleotide
gtgcagctggtgcagtctggggctgaggtgaagaagcctgggtcctcggtgaaggtctcctgcaagtcttctggaggcaccttcaacacctatgctatcaactgggtgcgacaggcccctggacaggggcttgagtggatgggagggctcatccctgtctttggtacagcaaactacgcacagaagttccaggacagagtcacgattaccgcggacacatcaacgaccacagcctacatggagctgaatagcctgacatctgaggacacggccgtgtattactgtgcgagagatggaggggctatagcaggtcttgactcctggggccagggaaccctggtcaccgtctcctcag

SEQ ID NO: 6528 - DNA, 358 bp, Artificial Sequence; identical to SEQ ID NO: 1667
  Description of Artificial Sequence: Synthetic polynucleotide

SEQ ID NO: 6529 - protein, 12 aa, Artificial Sequence
  Description of Artificial Sequence: Synthetic peptide
ARDGGAIAGLDS

SEQ ID NO: 6530 - DNA, 308 bp, Artificial Sequence
  Description of Artificial Sequence: Synthetic polynucleotide
cctgtccgtcacccctggacagtcggcctccatctcctgcaagtctagtcagagcctcctgcatagagatgggcagacctatttatattggtacctgcagaagccaggccagcctccacagctcctgatctatgaggtttccaaccggttctctggagtgccagataggttcagtggcagcgggtcagggacagatttcacactgaaaatcagccgggtggaggctgacgatgttggggtttattactgcatgcaaaatatacagcttccgctcactttcggcggagggaccaaggtggagatcaaac

SEQ ID NO: 6531 - DNA, 337 bp, Artificial Sequence; identical to SEQ ID NO: 1670
  Description of Artificial Sequence: Synthetic polynucleotide

SEQ ID NO: 6532 - protein, 9 aa, Artificial Sequence
  Description of Artificial Sequence: Synthetic peptide
MQNIQLPLT

SEQ ID NO: 6533 - DNA, 338 bp, Artificial Sequence
  Description of Artificial Sequence: Synthetic polynucleotide
ctggtgcagtctggggctgaggtgaggaagcctgggtcctcggtgagggtctcctgcaaggcttctggaggcaccttcaacaactatgccatcaactgggtgcgacaggcccctggacaagggcttgagtggatgggaaagatcatccctttctttggcacgccacactacgcacagaaatttcagggcagactcacaattaccgcggacaaatccacgagcacagcctacatggaactgaccagtctgacatctgaggacacggccgtctatttctgtgcgagaggtccctggggttgggactactggggccagggaaccctggtcgccgtctcctc

SEQ ID NO: 6534 - DNA, 347 bp, Artificial Sequence; identical to SEQ ID NO: 2579
  Description of Artificial Sequence: Synthetic polynucleotide

SEQ ID NO: 6535 - protein, 9 aa, Artificial Sequence
  Description of Artificial Sequence: Synthetic peptide
ARGPWGWDY

SEQ ID NO: 6536 - DNA, 293 bp, Artificial Sequence
  Description of Artificial Sequence: Synthetic polynucleotide
cctgtccttgtctccaggggaaagagccatcctctcttgcagggccagtcagagtgttagcagcgactacttcgcctggtaccagcagaaacctggccaggctcccaggctcctcatgtatggtacatccaccagggccactggcatcccggacaggttcagtggcagggggtctgagacagacttcactctcaccatcagcagactggagcctgcagattttgcagtgtattattgtcagcagtatggtacctcacccactttcggcggagggaccaaggtggagatcaaac

SEQ ID NO: 6537 - DNA, 322 bp, Artificial Sequence; identical to SEQ ID NO: 2582
  Description of Artificial Sequence: Synthetic polynucleotide

SEQ ID NO: 6538 - protein, 8 aa, Artificial Sequence
  Description of Artificial Sequence: Synthetic peptide
QQYGTSPT

SEQ ID NO: 6539 - DNA, 346 bp, Artificial Sequence
  Description of Artificial Sequence: Synthetic polynucleotide
gtgcagctggtgcagtctggggctgaggtgaagaagcctgggtcgtcggtgaaggtctcctgcaagacttctggaggcaacttcaacaactatgcgatcagctgggtgcgtcaggcccctggacaagggcttgagtggatgggggacgtcatccctatctttggcacgccaaactacgcacagaggtttaagggcagagtcacaatttccgcggacagatccacgaccacagcctacatggagctgaacagcctgagatctgatgacacggccgtctattactgtgcgaggggggtctggggctttgactactggggccagggaaccctggtcaccgtctcctcag

SEQ ID NO: 6540 - DNA, 349 bp, Artificial Sequence; identical to SEQ ID NO: 3599
  Description of Artificial Sequence: Synthetic polynucleotide

SEQ ID NO: 6541 - protein, 9 aa, Artificial Sequence
  Description of Artificial Sequence: Synthetic peptide
ARGVWGFDY

SEQ ID NO: 6542 - DNA, 293 bp, Artificial Sequence
  Description of Artificial Sequence: Synthetic polynucleotide
cctgtccttgtctccaggggagagagtcaccgtctcctgcagggccagtcagagtgttaacagcgactacttagcctggtaccagcagaagcctggccagcctcccaggctcctcatctatggtgcatccaccagggccactggcgtcccagacaggttcagtggcagtgggtctgggacagacttcactctcatcatcagcagactggagcctgaagattgtgcagtgtattactgtcagcagtttggtagttcggtcactttcggcggagggaccaaggtggagatcaaac

SEQ ID NO: 6543 - DNA, 322 bp, Artificial Sequence; identical to SEQ ID NO: 3602
  Description of Artificial Sequence: Synthetic polynucleotide

SEQ ID NO: 6544 - protein, 8 aa, Artificial Sequence
  Description of Artificial Sequence: Synthetic peptide
QQFGSSVT

SEQ ID NO: 6545 - DNA, 352 bp, Artificial Sequence
  Description of Artificial Sequence: Synthetic polynucleotide
agtctgggggaggcctggtcaagcctggggggtccctgagactctcctgtgcagcctctggattcaccttcagtgactttagcatgaactgggtccgccaggctccagggaaggggctggagtggatctcttacattagtagtactggtagtgacatatactacgcagactcagcgcagggccgattcaccatctccagagacaacgccaagaattcactgtttctgcaaatgaacagcctgagagccgaggacacggctacttattactgtgcgagagaaggtttagagagcggtagtttttatgaattcttccaacactggggccagggcaccctggtcaccgtcttctc

SEQ ID NO: 6546 - DNA, 368 bp, Artificial Sequence; identical to SEQ ID NO: 629
  Description of Artificial Sequence: Synthetic polynucleotide

SEQ ID NO: 6547 - protein, 16 aa, Artificial Sequence
  Description of Artificial Sequence: Synthetic peptide
AREGLESGSFYEFFQH

SEQ ID NO: 6548 - DNA, 316 bp, Artificial Sequence
  Description of Artificial Sequence: Synthetic polynucleotide
  modified_base (16)..(16): a, c, t, g, unknown or other
atgacccagtctccantctccctgtctgcatctgtaggagacagagtcaccatcacttgccgggccagtcagactattagtaggtggttggcctggtatcagcagaaaccagggaaagcccctaaactcctgatctataaggcgtctaatttagaaagtggggtcccattaaggttcagcggcagtggatctggtacacatttcactctcaccatcagcagcctgcagcctgatgattttgcaacttattactgccaacagtataatactttttctcggatcaccttcggcggagggaccaaggtggagatcaaac

SEQ ID NO: 6549 - DNA, 325 bp, Artificial Sequence; identical to SEQ ID NO: 632
  Description of Artificial Sequence: Synthetic polynucleotide
  modified_base (25)..(25): a, c, t, g, unknown or other

SEQ ID NO: 6550 - protein, 10 aa, Artificial Sequence
  Description of Artificial Sequence: Synthetic peptide
QQYNTFSRIT

SEQ ID NO: 6551 - DNA, 346 bp, Artificial Sequence
  Description of Artificial Sequence: Synthetic polynucleotide
gtggagtctgggggaggcctggtcaagcctggggggtccctgagactctcctgtgcggcctctggattcaccttcagtacctctaccatgcactgggtccgtcaggccccagggaaggggctggagtggctctcaattattagtgacactagcagtgacatttaccacgcagagtcactgaacggccgattcaccatctccagagacaacgccaagaactcactgtatctgcaaatgaacagcctgacagtcgaggacacggctgtgtattactgtgcgaaagatgggggtgactacgcatacttccaacactggggccagggcaccctggtcaccgtctcgtcag

SEQ ID NO: 6552 - DNA, 358 bp, Artificial Sequence; identical to SEQ ID NO: 2789
  Description of Artificial Sequence: Synthetic polynucleotide

SEQ ID NO: 6553 - protein, 12 aa, Artificial Sequence
  Description of Artificial Sequence: Synthetic peptide
AKDGGDYAYFQH

SEQ ID NO: 6554 - DNA, 296 bp, Artificial Sequence
  Description of Artificial Sequence: Synthetic polynucleotide
cctgtctgcttctgtaggagacagagtcgccatcacttgccgggccagtcaaaatattagaacctggttggcctggtatcagcagaaaccagggaaagcccctaaactcctaatctataaggcttctactttagagagtggggtcccatcaaggttcagcgggagtggatctgggacagaattcactctcaccgtcagcagcctgcagccagatgattttgcgacttattactgccaacagtataatacttattcgaagatcactttcggcggagggaccaaggtggagatcaaac

SEQ ID NO: 6555 - DNA, 325 bp, Artificial Sequence; identical to SEQ ID NO: 2792
  Description of Artificial Sequence: Synthetic polynucleotide

SEQ ID NO: 6556 - protein, 10 aa, Artificial Sequence
  Description of Artificial Sequence: Synthetic peptide
QQYNTYSKIT

SEQ ID NO: 6557 - DNA, 370 bp, Artificial Sequence
  Description of Artificial Sequence: Synthetic polynucleotide
gcagctgttggagtctgggggaggcttggtccagccgggggggtccctgagactctcctgtgcaggctctgaattcagcttttatgaatatgtcatgatttgggtccgccaggctccagggaaggggctggagtgggtctctagtatcagtagtagtggtcgtagcacaaactacgcagactccgtgaagggccgcttcaccatctccagagacaacacgaagaacacgctgtttctgcaaatgaagagcctgagagccgaggacacggccctatattactgtgccagaggagaaaacgattattggagtggttctttttactacggtattgacgtctggggccaaggggccacggtcaccgtctcctca

SEQ ID NO: 6558 - DNA, 375 bp, Artificial Sequence; identical to SEQ ID NO: 3071
  Description of Artificial Sequence: Synthetic polynucleotide

SEQ ID NO: 6559 - protein, 18 aa, Artificial Sequence
  Description of Artificial Sequence: Synthetic peptide
ARGENDYWSGSFYYGIDV

SEQ ID NO: 6560 - DNA, 309 bp, Artificial Sequence
  Description of Artificial Sequence: Synthetic polynucleotide
cctgccccgtcacccctggagagccggcctccatctcctgcaggtctagtcagagcctcctgcatactaatggatacaactacttggattggtacctgcagaagccagggcagtctccacagctcctgatctatatgggttctaatcgggcctccggggtccctgacaggttcactggcagtggatcaggcacagattttacactgaaaatcagcagagtggaggctgacgatgttggggtttattactgcatgcaagctctacaaacccggtacacttttggccaggggaccaagctggagatcaaac

SEQ ID NO: 6561 - DNA, 337 bp, Artificial Sequence; identical to SEQ ID NO: 3074
  Description of Artificial Sequence: Synthetic polynucleotide

SEQ ID NO: 6562 - protein, 9 aa, Artificial Sequence
  Description of Artificial Sequence: Synthetic peptide
MQALQTRYT

SEQ ID NO: 6563 - DNA, 374 bp, Artificial Sequence
  Description of Artificial Sequence: Synthetic polynucleotide
tgcagctgttggagtctgggggaggcttggtacagcctggggggtccctgagactctcctgtgcagcctctggattcacttttagcagctacgccatgacttgggtccgccaggctccagggcaggggctggagtgggtctcatctattagcagtagtggcagtagcgcatcctactcagcctccgtgcagggccggttcaccatctcccgagacaattccaagaacacgctgtatgtgcaaatgaatagcctgagagacgaggacacggccgtctattactgtgcgaaagatggacttaaaggatcttcctattactactactattccggtatggacgtctggggccaagggaccacggtcaccgtctcctca

SEQ ID NO: 6564 - DNA, 378 bp, Artificial Sequence; identical to SEQ ID NO: 4511
  Description of Artificial Sequence: Synthetic polynucleotide

SEQ ID NO: 6565 - protein, 19 aa, Artificial Sequence
  Description of Artificial Sequence: Synthetic peptide
AKDGLKGSSYYYYYSGMDV

SEQ ID NO: 6566 - DNA, 309 bp, Artificial Sequence
  Description of Artificial Sequence: Synthetic polynucleotide
ccctgcccgtcacccctggagagccggcctccatctcctgcaggtctagtcagagcctcctgcatagtaatggatacaactatttggattggtacctgcagaagccagggcagtctccacagctcctgatctatttgggttctaatcgggcctccggggtccctgacaggttcagtggcagtggatcaggcacagattttacactgaaaatcagcagagtggaggctgaggatgttggggtttattactgcatgcaagctctacaaactccgtacacttttggccaggggaccaagctggagatcaaac

SEQ ID NO: 6567 - DNA, 337 bp, Artificial Sequence; identical to SEQ ID NO: 4514
  Description of Artificial Sequence: Synthetic polynucleotide

SEQ ID NO: 6568 - protein, 9 aa, Artificial Sequence
  Description of Artificial Sequence: Synthetic peptide
MQALQTPYT

SEQ ID NO: 6569 - DNA, 355 bp, Artificial Sequence
  Description of Artificial Sequence: Synthetic polynucleotide
gtgcagctggtggagtctgggggaggcgtggtccagcctggggggtccctgagactctcctgtgaagcctctggattcacattcaataaatataatatggactgggtccgccaggctccaggcaaggggctggagtgggtggcaattatttcagatgatggaagtaatgaatactatccagagtctgtgcggggccgattcaccatctccagagacaattcccagaacacgctgtatctgcaaatgaacatcttgacaactgacgacacggctgtttattactgtgtgagagatcggggatacagctctgctttcgactactggggacaggggtccctggtcatcgtctcctcag

SEQ ID NO: 6570 - DNA, 358 bp, Artificial Sequence; identical to SEQ ID NO: 2693
  Description of Artificial Sequence: Synthetic polynucleotide

SEQ ID NO: 6571 - protein, 12 aa, Artificial Sequence
  Description of Artificial Sequence: Synthetic peptide
VRDRGYSSAFDY

SEQ ID NO: 6572 - DNA, 294 bp, Artificial Sequence
  Description of Artificial Sequence: Synthetic polynucleotide
ccctgtctgtgtctccagggggaagagccaccctctcctgcggggccagtcagactattggcaccaacttagcctggtatcagcagaaacgtgagcagactcccaggctcctcatctatgatgcttccactagggccactggtgtcccagccaggttcagtggcagtgggtctgggacaaagttcactctcaccatcagcagcctgcagtctgaagattttggagtttattactgtcagcagtatgatttctggcctctcactttcggcggagggaccaaggtggagatcaaac

SEQ ID NO: 6573 - DNA, 322 bp, Artificial Sequence; identical to SEQ ID NO: 2696
  Description of Artificial Sequence: Synthetic polynucleotide

SEQ ID NO: 6574 - protein, 9 aa, Artificial Sequence
  Description of Artificial Sequence: Synthetic peptide
QQYDFWPLT

SEQ ID NO: 6575 - DNA, 354 bp, Artificial Sequence
  Description of Artificial Sequence: Synthetic polynucleotide
tggtggagtctgggggaggcgtggtccagcctgggaggtccctgagactctcctgtgcagcctctggattcacgttcaggagccatggcatgcactgggtccgccaggctccaggcaaggggctggagtgggtggcagttatatcagatgatggaagtcagatagaatatggaggctccgtgaagggccgattcaccatctccagagacaattccaagaacacgctgtatctgcatatcaacagcctgagacctgaagacacggctgtgtattactgtgcgacagatccgcgggactggatcgacaactactttgactactggggtcagggaaccctggtcaccgtctcctcag

SEQ ID NO: 6576 - DNA, 364 bp, Artificial Sequence; identical to SEQ ID NO: 3767
  Description of Artificial Sequence: Synthetic polynucleotide

SEQ ID NO: 6577 - protein, 14 aa, Artificial Sequence
  Description of Artificial Sequence: Synthetic peptide
ATDPRDWIDNYFDY

SEQ ID NO: 6578 - DNA, 293 bp, Artificial Sequence
  Description of Artificial Sequence: Synthetic polynucleotide
cctgtctgtgtctccaggggaaagagccaccctctcctgtagggccagtcagagtgtaaccagcaactttgcctggtaccagcagaaacctggccaggctcccaggctcctcatctatggtgcatcgaccagggccactggtatcccagccaggttcagtggcagtgggtctgggacagagttcactctcaccatcagcagcctgcagtctgaagatgctgcagtctattactgtcagcagtatgattactggccgctcactttcggcggagggaccaagctggagatcaaac

SEQ ID NO: 6579 - DNA, 322 bp, Artificial Sequence; identical to SEQ ID NO: 3770
  Description of Artificial Sequence: Synthetic polynucleotide

SEQ ID NO: 6580 - protein, 9 aa, Artificial Sequence
  Description of Artificial Sequence: Synthetic peptide
QQYDYWPLT

SEQ ID NO: 6581 - DNA, 341 bp, Artificial Sequence
  Description of Artificial Sequence: Synthetic polynucleotide
ggtggagtctgggggaggcgtggtccagcctgggaggtccctaagactctcctgtgcagcctctggattcaccttcagtcactatggcatgcactgggtccgccaggctccaggcaaggggctgcagtggatggctatgatctcatatgatggaggttataaatactatgcagactccgtgaagggccgattcaccatctccagagacgattccaagaacacactgtctctgcaaatgggcagcctgagaagtgaggacacggctgtgtattactgtgcgagaggctgggctggcctgttcgactactggggccagggaatcctggtcagcgtctcctcag

SEQ ID NO: 6582 - DNA, 352 bp, Artificial Sequence; identical to SEQ ID NO: 1109
  Description of Artificial Sequence: Synthetic polynucleotide

SEQ ID NO: 6583 - protein, 10 aa, Artificial Sequence
  Description of Artificial Sequence: Synthetic peptide
ARGWAGLFDY

SEQ ID NO: 6584 - DNA, 359 bp, Artificial Sequence
  Description of Artificial Sequence: Synthetic polynucleotide
  modified_base (8)..(8): a, c, t, g, unknown or other
  modified_base (10)..(13): a, c, t, g, unknown or other
ctagtagncnnnngcaaccggttcctggtcccagtctgtgctgactcagcctcgctcagtgtccgggtctcctggacagtcagtcaccatctcctgcactggaaccagcagtgatgttggtggttataattatgtctcctggtaccaacaacacccaggcaaagcccccaaagtcttgatttatgatgtcaatgagcggccctcaggggtccctgatcgcttctctggctccaagtctggcaacacggcctccctgaccatctctgggctccaggctgaggatgaggctgaatattactgctgctcatttacaggcacatcttatgtcttcggaactgggacccaggtcaccgtcctag

SEQ ID NO: 6585 - DNA, 328 bp, Artificial Sequence; identical to SEQ ID NO: 1112
  Description of Artificial Sequence: Synthetic polynucleotide

SEQ ID NO: 6586 - protein, 9 aa, Artificial Sequence
  Description of Artificial Sequence: Synthetic peptide
CSFTGTSYV

SEQ ID NO: 6587 - DNA, 336 bp, Artificial Sequence
  Description of Artificial Sequence: Synthetic polynucleotide
agtctgggggaggcgtggtccagcctgggaggtccctgagactctcctgtgaagtctctggattcaccttcagtcactatggcatgcactgggtccgccagggtccaggcaaggggctggagtgggtggcattcatatcatatgatgggagttataaagactatgcaaagtccgtgaagggccgactcaccatctccagagacaattccaagaacatgctgtatctgcaaatgaatagcctaagacctgaagacacggctgtgtatttttgtgcgagaagttatggtggcttgtttgacaattggggccagggaaccctggtcaccgtctcctcag

SEQ ID NO: 6588 - DNA, 352 bp, Artificial Sequence; identical to SEQ ID NO: 4313
  Description of Artificial Sequence: Synthetic polynucleotide

SEQ ID NO: 6589 - protein, 10 aa, Artificial Sequence
  Description of Artificial Sequence: Synthetic peptide
ARSYGGLFDN

SEQ ID NO: 6590 - DNA, 317 bp, Artificial Sequence
  Description of Artificial Sequence: Synthetic polynucleotide
gactcagcctcgctcagtgtccgggtctcctggacagtcagtcaccatctcctgcactggaaccagcagtgatgttggtggttataactttgtctcctggtaccagcagcacccaggcaaagccccccaactcatgatttatgatgtcaataagcggccctcaggagtccctgatcggttctctggctccaagtctggcaacacggcctccctgaccatctctgggctacaggctgaggatgaggctgattattactgctgctcatatgctggcagcccttatgtcttcggaggtgggactacggtcaccgtcctag

SEQ ID NO: 6591 - DNA, 328 bp, Artificial Sequence; identical to SEQ ID NO: 4316
  Description of Artificial Sequence: Synthetic polynucleotide

SEQ ID NO: 6592 - protein, 9 aa, Artificial Sequence
  Description of Artificial Sequence: Synthetic peptide
CSYAGSPYV

SEQ ID NO: 6593 - DNA, 355 bp, Artificial Sequence
  Description of Artificial Sequence: Synthetic polynucleotide
cagctggtggagtctgggggaggcgtggtccagcctgggcggtccctgagactctcctgtgcagcctctggattcaccttttatagttatggccttcactgggtccgccaggccccaggcaaggggctggagtgggtggcacttatttcatatgatggaacttataagttctattcagactccgtgaagggccgattcaccatctccagagacaattccaagaatacgatgtttctgcaaatgaacagcctcagaggtgaagacacggctgtctattactgtgcgaaggttgggggagcagtggctggtctgcttgactcctggggccagggaaccctggtcaccgtctcctcag

SEQ ID NO: 6594 - DNA, 361 bp, Artificial Sequence; identical to SEQ ID NO: 1727
  Description of Artificial Sequence: Synthetic polynucleotide

SEQ ID NO: 6595 - protein, 13 aa, Artificial Sequence
  Description of Artificial Sequence: Synthetic peptide
AKVGGAVAGLLDS

SEQ ID NO: 6596 - DNA, 323 bp, Artificial Sequence
  Description of Artificial Sequence: Synthetic polynucleotide
gactcagtcgccctctgcctctgcctccctgggagcctcggtcaaactcacctgcactctgagcagtgggcacagcggctatgtcatcgcctggcatcagcagcagccagacaaaaggcctcgatatttgatgaatcttaacagtgatggcagccacaccaagggggacgggatcccagatcgcttctcaggctccagctctggggctgaccgttaccttaccatctccagcctccagtctgaggatgaggctgactattactgtcagacctgggacactggctctgtggtcttcggcggagggaccaagctgaccgtcctag

SEQ ID NO: 6597 - DNA, 334 bp, Artificial Sequence; identical to SEQ ID NO: 1730
  Description of Artificial Sequence: Synthetic polynucleotide

SEQ ID NO: 6598 - protein, 9 aa, Artificial Sequence
  Description of Artificial Sequence: Synthetic peptide
QTWDTGSVV

SEQ ID NO: 6599 - DNA, 359 bp, Artificial Sequence
  Description of Artificial Sequence: Synthetic polynucleotide
ggtgcagctggtggagtctgggggaggcgtggtccagcctgggaggtccctgagactctcctgtgtagcctctggattcaccttcagtacctatggcatgcactgggtccgccaggctccaggcaaggggctggagtgggtggcagttatgtcatatgacggaactcttaacaagtatgcagactctgtgaagggccgcttcaccatctccagagacaattccaagaacacgctgtttctgcaaatgaacagcctgagacctgaggacacggctgtctattactgtgcgaaagtggctgggaacttcgggggtctctttgactattggggccagggaaacctggtcatcgtctcctcag

SEQ ID NO: 6600 - DNA, 361 bp, Artificial Sequence; identical to SEQ ID NO: 2327
  Description of Artificial Sequence: Synthetic polynucleotide

SEQ ID NO: 6601 - protein, 13 aa, Artificial Sequence
  Description of Artificial Sequence: Synthetic peptide
AKVAGNFGGLFDY

SEQ ID NO: 6602 - DNA, 366 bp, Artificial Sequence
  Description of Artificial Sequence: Synthetic polynucleotide
  modified_base (12)..(15): a, c, t, g, unknown or other
tctagtagggcnnnngcaaccggttcctgggcccagtctgtgctgactcagtcgccctctgcctctgcctccctgggagcctcggtcaagctcacctgcactctgagcagcgggcacacctactactccatcgcatggcatcggcagcagtcagagaagggccctcggtacttgatgactctgaacagtgatggcagccacaacaggggggacgggatccctgatcgcttctcaggctccagctctgggcctgagcgctacctcaccatctccagcctccagtctgaggatgaggctgactattactgtcagacctggtaccatggcactgtgatcttcggcggagggaccaagctgaccgtccta

SEQ ID NO: 6603 - DNA, 333 bp, Artificial Sequence; identical to SEQ ID NO: 2330
  Description of Artificial Sequence: Synthetic polynucleotide

SEQ ID NO: 6604 - protein, 9 aa, Artificial Sequence
  Description of Artificial Sequence: Synthetic peptide
QTWYHGTVI

SEQ ID NO: 6605 - DNA, 360 bp, Artificial Sequence
  Description of Artificial Sequence: Synthetic polynucleotide
gtgcagctggtggagtctgggggaggcgtggtccagcctgggaggtccctgagactctcctgtgcagcgtctggattcaccttcagtatctatggcatgcactgggtccgccaggctccaggcaaggggctggagtgggtggcagttatttggtatgatggaagtaataaatactatgcagactccgtgaagggccgattcaccatctccagagacaattccaagaacacgctgtttctgcaaatgaacagcctgagagccgaggacacggctgtgtattactgtgcgaggggatacagccccaactactactacgctatggacgtctggggccaagggaccacggtcaccgtctcctca

SEQ ID NO: 6606 - DNA, 363 bp, Artificial Sequence; identical to SEQ ID NO: 4295
  Description of Artificial Sequence: Synthetic polynucleotide

SEQ ID NO: 6607 - protein, 14 aa, Artificial Sequence
  Description of Artificial Sequence: Synthetic peptide
ARGYSPNYYYAMDV

SEQ ID NO: 6608 - DNA, 351 bp, Artificial Sequence
  Description of Artificial Sequence: Synthetic polynucleotide
caaccggttcctggtcccagtctgtgctgactcagccgccctcagtgtctggggccccagggcagagggtcaccatctcctgcactgggagcagctccaacatcggggcaggttatgatgtacagtggtaccagcagcttccaggaacagtccccaaactcctcatctatgctaacagcattcggccctcaggggtccctgaccgattctctggctccaagtctggcacctcagcctccctggccatcactgggctccaggctgaggatgaggctgattattactgccagtcctatgacagcagcctgagtggttatgtcttcggaactgagaccaaggtcaccgtcctag

SEQ ID NO: 6609 - DNA, 334 bp, Artificial Sequence; identical to SEQ ID NO: 4298
  Description of Artificial Sequence: Synthetic polynucleotide

SEQ ID NO: 6610 - protein, 11 aa, Artificial Sequence
  Description of Artificial Sequence: Synthetic peptide
QSYDSSLSGYV

SEQ ID NO: 6611 - DNA, 360 bp, Artificial Sequence
  Description of Artificial Sequence: Synthetic polynucleotide
gtgcagctggtggagtctgggggaggcgtggtccagcctgggaggtccctgagactctcatgtgcagcgtctggattcaccttcagtagttatggcatgcactgggtccgccaggctccaggcaagggcctggagtgggtggcagttatatggaatgatggaactaatcattactacgcagactccgtgaagggccgattcaccatctccagagacaattccaaggataccctgtatctgcaagtgagcagcctgagagccgaggacacggctgtatattactgtgcgagaggtgtccagacatattactactacgctatggacgtctggggccaagggaccccggtcactgtctcctca

SEQ ID NO: 6612 - DNA, 363 bp, Artificial Sequence; identical to SEQ ID NO: 4595
  Description of Artificial Sequence: Synthetic polynucleotide

SEQ ID NO: 6613 - protein, 14 aa, Artificial Sequence
  Description of Artificial Sequence: Synthetic peptide
ARGVQTYYYYAMDV

SEQ ID NO: 6614 - DNA, 348 bp, Artificial Sequence
  Description of Artificial Sequence: Synthetic polynucleotide
ccggttcctggtcccagtctgtgctgactcagccgccctcagtgtctggggccccagggcagagggtcaccatctcctgcactgggagcagctccaacatcggggcagcttatgatgtacagtggtaccagcagcttccaggaacagcccccaaactcctcatctatggtaacaccaatcggccctcaggggtccctgaccgattctctggctccaagtctggcacctcagcctccctggccatcactgggctccaggctgacgatgaggctgattattactgccagtcctatgacagcagcctgagtggttatgtcttcggaacggggaccagggtcgccgtcctag

SEQ ID NO: 6615 - DNA, 334 bp, Artificial Sequence; identical to SEQ ID NO: 4598
  Description of Artificial Sequence: Synthetic polynucleotide

SEQ ID NO: 6616 - protein, 11 aa, Artificial Sequence
  Description of Artificial Sequence: Synthetic peptide
QSYDSSLSGYV

SEQ ID NO: 6617 - DNA, 360 bp, Artificial Sequence
  Description of Artificial Sequence: Synthetic polynucleotide
gtgcagctggtggagtctgggggaggcgtggtccagcctgggaggtccctgagactctcttgtgcagcgtctggattcaccttcagtagctatggcatgcactgggtccgccaggctccaggcaaggggctggagtgggtggcagttatatggtatgatggaactaataaatactatgcagactccgtgaagggccgattcaccatctccagagacaattccaagaacacgctgtatctgcaaatgaacagcctgagagccgaggacacggctctgtattactgtgcgaaagggattaccccctactattactacggtatggacgtctggggccaagggaccacggtcaccgtctcctca

SEQ ID NO: 6618 - DNA, 363 bp, Artificial Sequence; identical to SEQ ID NO: 1001
  Description of Artificial Sequence: Synthetic polynucleotide

SEQ ID NO: 6619 - protein, 14 aa, Artificial Sequence
  Description of Artificial Sequence: Synthetic peptide
AKGITPYYYYGMDV

SEQ ID NO: 6620 - DNA, 364 bp, Artificial Sequence
  Description of Artificial Sequence: Synthetic polynucleotide
  modified_base (9)..(12): a, c, t, g, unknown or other
ctagtagtnnnngcaaccggttcctggtcccagtctgtgctgactcagccgccctcagtgtctggggccccagggcagagggtcaccatctcctgcactgggagcagctccaacatcggggcaggttatgatgtacagtggtaccagcagcttccaagaacagcccccaaactcctcatctatgctaacagcaatcggccctcaggggtccctgaccgattctctggctccaagtctggcacctcagcctccctggccatcactgggctccaggctgaggatgaggctgattattactgccagtcctatgacagcagcctgagtggttatgtcttcggaactgggaccaaggtcaccgtcctag

SEQ ID NO: 6621 - DNA, 334 bp, Artificial Sequence; identical to SEQ ID NO: 1004
  Description of Artificial Sequence: Synthetic polynucleotide

SEQ ID NO: 6622 - protein, 11 aa, Artificial Sequence
  Description of Artificial Sequence: Synthetic peptide
QSYDSSLSGYV

SEQ ID NO: 6623 - DNA, 341 bp, Artificial Sequence
  Description of Artificial Sequence: Synthetic polynucleotide
agtctgggggaggcgtggtccagcctgggaggtccctgagactctcctgtgcagcgtctggattcaccttcagtaactatggcatgcactgggtccgccaggctccaggcaaggggctggagtgggtggcagttatatggtatgatggaagtaataaattttatgcagactccgagcgattcaccatctccagagacaattccaagaacacgctgtatctgcaaatgaacagcctgagagccgaggacacggctgtgtattactgtgcgaagggctacagtcctaactactactacggtatggacgtctggggccaagggaccacggtcaccgtctcctca

SEQ ID NO: 6624 - DNA, 357 bp, Artificial Sequence; identical to SEQ ID NO: 1697
  Description of Artificial Sequence: Synthetic polynucleotide

SEQ ID NO: 6625 - protein, 14 aa, Artificial Sequence
  Description of Artificial Sequence: Synthetic peptide
AKGYSPNYYYGMDV

SEQ ID NO: 6626 - DNA, 365 bp, Artificial Sequence
  Description of Artificial Sequence: Synthetic polynucleotide
  modified_base (11)..(13): a, c, t, g, unknown or other
ctagtaggccnnngcaaccggttcctggtcccagtctgtgctgactcagccgccctcagtgtctggggccccagggcagagggtcaccatctcctgcactgggagcagctccaacatcggggcaggttatgatgtacagtggtaccagcagcttccaggaacagcccccaaactcctcatctatggtaacagcaatcggccctcaggggtccctgatcgattctctggctccaagtctggcacctcagcctccctggccatcactgggctccaggctgaggatgaggctgattattactgtcagtcctatgacagcagcctgagtgcttatgtcttcggaactgggaccaaggtcaccgtcctag

SEQ ID NO: 6627 - DNA, 334 bp, Artificial Sequence; identical to SEQ ID NO: 1700
  Description of Artificial Sequence: Synthetic polynucleotide

SEQ ID NO: 6628 - protein, 11 aa, Artificial Sequence
  Description of Artificial Sequence: Synthetic peptide
QSYDSSLSAYV

SEQ ID NO: 6629 - DNA, 346 bp, Artificial Sequence
  Description of Artificial Sequence: Synthetic polynucleotide
gagtctgggggaggcttggtacagcctggggggtccctaagactctcctgtacagcctctggattcaccctcagtacctatgccgtgaactgggtccgccaggctccagggaaggggctggagtgggtttcatacattagtagtggtagcacttccatatactacccagactctgtgcagggccggttcaccatctccagagacgatgccaacaactcactgtttctacaactgaacggcctgagagccgaggacacggctgtttattactgtgcgatcaatttagtggcttcttattcctactttgacttgtggggccagggaaccctggtcaccgtctcctcag

SEQ ID NO: 6630 - DNA, 361 bp, Artificial Sequence; identical to SEQ ID NO: 1571
  Description of Artificial Sequence: Synthetic polynucleotide

SEQ ID NO: 6631 - protein, 13 aa, Artificial Sequence
  Description of Artificial Sequence: Synthetic peptide
AINLVASYSYFDL

SEQ ID NO: 6632 - DNA, 282 bp, Artificial Sequence
  Description of Artificial Sequence: Synthetic polynucleotide
taggagacagagtcgccatcagttgccgggccagtcatagcattagtaggtggttggcctggtatcagcagaaaccagggaaagcccctaaactcctgatctataaggcgtctactttggaaagtggggtcccgtcaaggttcagcggcagtggatctgggacagaattcactctcaccatcaccagcctgcagcctgatgactttgcaacttattactgccaacagtataatactttttcggcgctcacgttcggcggagggaccaaggtggagatcaaac

SEQ ID NO: 6633 - DNA, 325 bp, Artificial Sequence; identical to SEQ ID NO: 1574
  Description of Artificial Sequence: Synthetic polynucleotide

SEQ ID NO: 6634 - protein, 10 aa, Artificial Sequence
  Description of Artificial Sequence: Synthetic peptide
QQYNTFSALT

SEQ ID NO: 6635 - DNA, 359 bp, Artificial Sequence
  Description of Artificial Sequence: Synthetic polynucleotide
ggagtctgggggcgggttgatacagccgggggggtctctgagactctcctgtgcagcctctggattctccttcagttcccatagcatgaactgggtccgccaggctccagggaaggggctggagtgggtttcatacattagtagtagtagtattgacatatattatgcagactctgtgaagggccgattcgccatctccagagacaatggcaggaacacattgtatctgcaaatgaacagcctgagagccgaggacacggctgtatatttctgtgcgagagagacatacgaatctgggagtggttattatgaatacttcgactactggggccagggaaccctggtcaccgtctcctcag

SEQ ID NO: 6636 - DNA, 373 bp, Artificial Sequence; identical to SEQ ID NO: 3287
  Description of Artificial Sequence: Synthetic polynucleotide

SEQ ID NO: 6637 - protein, 17 aa, Artificial Sequence
  Description of Artificial Sequence: Synthetic peptide
ARETYESGSGYYEYFDY

SEQ ID NO: 6638 - DNA, 294 bp, Artificial Sequence
  Description of Artificial Sequence: Synthetic polynucleotide
tgtctgcttctttaggagacagagtcaccatcacttgccgggccagtcagactattagtagatggttggcctggtatcagcagaaaccagggaaagcccctaaactcctcatctatagggcgtccaatttacatagtggggtcccatcaaggttcagcggcagtggatctgggacagaattcactctcaccatcagcagcctgcagcctgatgattctgccacttattactgccaacagtataatactttttctcggctcacgttcggcggagggaccaaggtggagttcaaac

SEQ ID NO: 6639 - DNA, 325 bp, Artificial Sequence; identical to SEQ ID NO: 3290
  Description of Artificial Sequence: Synthetic polynucleotide

SEQ ID NO: 6640 - protein, 10 aa, Artificial Sequence
  Description of Artificial Sequence: Synthetic peptide
QQYNTFSRLT

SEQ ID NO: 6641 - DNA, 338 bp, Artificial Sequence
  Description of Artificial Sequence: Synthetic polynucleotide
ggagtcgggcccaggactggtgaagccttcacagaccctgtccctcacctgcactgtctctggtggctccatcagcagtggtggttactactggagctggttccgccagcacccagggaagggcctggagtggattgggttcatctattacaatgggagaacctactacaacccgtccctcaagagtcgacttaccatatcagtagacacgtctaagaaccagttctccctgaggctgagctctgtgactgccgcggacacggccgtttattactgtgcgagagatctaggacactttgactcctggggccagggaaccctggtcaccgtctcctcag

SEQ ID NO: 6642 - DNA, 352 bp, Artificial Sequence; identical to SEQ ID NO: 1085
  Description of Artificial Sequence: Synthetic polynucleotide

SEQ ID NO: 6643 - protein, 9 aa, Artificial Sequence
  Description of Artificial Sequence: Synthetic peptide
ARDLGHFDS

SEQ ID NO: 6644 - DNA, 362 bp, Artificial Sequence
  Description of Artificial Sequence: Synthetic polynucleotide
  modified_base (8)..(9): a, c, t, g, unknown or other
ctagtagnnaactgcaaccggttcctggtcccagtctgtgctgactcagcctgcctccgtgtctgggtctcctggacagtcgatcatcatctcctgcactggaaccagcagtgacgttggtttttataactatgtctcctggtaccaacaacacccaggcaaagcccccaaactcatgatttatgaggtcagtaatcggccctcagggatttctactcgcttctctggctccaagtctggcaacacggccttcctgaccatctctgggctccaggctgaggacgaggctgattattactgcagctcatatataagcggcggcactcgggtgttcggcggagggaccaagctgaccgtcctag

SEQ ID NO: 6645 - DNA, 331 bp, Artificial Sequence; identical to SEQ ID NO: 1088
  Description of Artificial Sequence: Synthetic polynucleotide

SEQ ID NO: 6646 - protein, 10 aa, Artificial Sequence
  Description of Artificial Sequence: Synthetic peptide
SSYISGGTRV

SEQ ID NO: 6647 - DNA, 348 bp, Artificial Sequence
  Description of Artificial Sequence: Synthetic polynucleotide
tgcagctgcaggagtcgggcccaggactggtgaagccttcacagaccctgtccctcacctgcactgtctctggtggctccgtcagcagtggtggttactactggagctggatccgccagcacccagggaagggcctggagtggattgggttcatctattacactgggaggacctactacaacccgtccctcaagagtcgacttaccatatctgtagacacgtctaagaatcagttctccctgaagctgagctctgtaactgccgcggacacggccgtatattattgtgcgagagatctggggtactttgactcctggggccagggagccctggtcaccgtctcctcag

SEQ ID NO: 6648 - DNA, 352 bp, Artificial Sequence; identical to SEQ ID NO: 4235
  Description of Artificial Sequence: Synthetic polynucleotide

SEQ ID NO: 6649 - protein, 9 aa, Artificial Sequence
  Description of Artificial Sequence: Synthetic peptide
ARDLGYFDS

SEQ ID NO: 6650 - DNA, 318 bp, Artificial Sequence
  Description of Artificial Sequence: Synthetic polynucleotide
gactcagcctgcctccgtgtctgggtctcctggacagtcgatcaccatctcctgcactggaaccagcagtgacctttataattataactatgtctcctggtaccaaaagcacccaggcaaagcccccaaactcttgatttatgaggtcagtaatcggccctcaggggtttctaatcgcttctctggctccaagtctggcaacacggcctccctgaccatctctggactccaggctgaggacgaggctgattattactgcagctcatatataagtggcagcactcgggtgttcggcggagggaccaagctgaccgtcct

SEQ ID NO: 6651 - DNA, 329 bp, Artificial Sequence; identical to SEQ ID NO: 4238
  Description of Artificial Sequence: Synthetic polynucleotide

SEQ ID NO: 6652 - protein, 10 aa, Artificial Sequence
  Description of Artificial Sequence: Synthetic peptide
SSYISGSTRV

SEQ ID NO: 6653 - DNA, 352 bp, Artificial Sequence
  Description of Artificial Sequence: Synthetic polynucleotide
caggtgcagctggtgcagtctggggctgaggtgaagaagcctgggtcctcggtgaaggtctcctgcaaggcttctggaggcaccttcagaaattatgctttcagttgggtgcgactggcccctggacaagggcttgagtggatgggacagatcatccctttctttggtacaccaaattacgcacagaagttccagggcagagtcacgattaccgcggacgaatccacgagcacagcctacatggagctgaccagcctgagatctgaggacacggccgtttatttctgtgcgagagatgcttttgaagaaatggcgtattggggtcagggaacccaggtcaccgtctcctcag

SEQ ID NO: 6654 - DNA, 358 bp, Artificial Sequence
  Description of Artificial Sequence: Synthetic polynucleotide
caggtgcagctggtgcagtctggggctgaggtgaagaagcctgggtcctcggtgaaggtctcctgcaagtcttctggaggcaatttcaacaactttgctattagttgggtgcgacaggcccctggacaagggcttgagtggatgggagggatcatccccatctttggaacaccaaactacgcacagaagttccagggcagagtcacgattaccgcggacaaatccacgaccacagcctacatggaggtgaacagtctgagatctgacgacacggccgtatattactgtgcgagagaaggggggtcagcagccgaatttgagttctggggccagggaaccctggtcaccgtctcctcag

SEQ ID NO: 6655 - DNA, 370 bp, Artificial Sequence
  Description of Artificial Sequence: Synthetic polynucleotide
gaggtgcagctggtggagtccgggggaggcttagttccgcctggggggtccctgagactctcatgtgcagcctctggattcagcttcagaagctactggatgcactgggtccgccaagctccagggaaggggctggtgtgggtctcacgtcttaatagtgttgggagtgttacaagctacgcggactccgtgaagggccgattcaccatctccagagacaacgccaagaacatgctgtatttgcaactgaacagtctgacagccgacgacacggctgtgtattattgtgcaagtggaggactgggactcacgacgacaaccgactactttgacaactggggccagggaacccaggtcaccgtctcctcag

SEQ ID NO: 6656 - DNA, 355 bp, Artificial Sequence
  Description of Artificial Sequence: Synthetic polynucleotide
caggtccagctggtgcagtctggggctgaggtgaagaagcctgggtcctcagtgaaagtctcctgcaaggtttctggaggcaccttcagcaactatgctatcagctgggtgcgacaggcccctggacaaggtcttgaatggatgggagatatcatccctatttttcgttcagcaaactacgcacagaagttccaggggagagtcacgattaccgcggacgaatccacgagcacaggctacatggaactgaccagcctcagatctgacgacacggccgtgtattactgtgcgagagatgggggcatggcatcctttgactactggggccagggaaccctggtcaccgtctcctcag

SEQ ID NO: 6657 - DNA, 358 bp, Artificial Sequence
  Description of Artificial Sequence: Synthetic polynucleotide
caggtgcagctggtgcagtctggggctgaggtgaagaagcctgggtcctcggtgaaagtctcgtgcaaggcttctggaggcaccttcagtcactatgatttcagttgggtgcgacaggcccctggacaagggcttgagtggatgggaggcatcatccctgtctttcgttcagcaaattacgcacagaagtttcagggcagactcactattaccgcggacgaatccacgaccacagtctacatggagttgagtagcctgagatctgaggacacggccgtatattactgtgcgagagatggcggagcactggctgcttttgagtactggggcctgggaaccctagtcaccgtctcctcag

SEQ ID NO: 6658 - DNA, 361 bp, Artificial Sequence
  Description of Artificial Sequence: Synthetic polynucleotide
caggttcagctggtgcagtctggagctgaggtgaagaagcctggggcctcagtgaaggtctcctgcaagacttctggttacacctttagcacctatggtatcagctgggttcgacaggcccctggacaaggacttgagtggatggggtggatcagcggttataatggtcacacaagctatgcacagaacttccgggacagagtcgccatgaccacagacgcgtccacgaacacagtgtacatggagctgaggagcctgagatctgacgacacggccgtctatttctgtgcgagagtgcaaacttttaggtactggtatttcgatctctggggccgtggcaccctggtcactgtctcctcag

SEQ ID NO: 6659 - DNA, 364 bp, Artificial Sequence
  Description of Artificial Sequence: Synthetic polynucleotide
caggtgcagctggtggagtctgggggaggcgtggtccagcctgggaggtccctgagactctcctgtgcagcctctggattcaccttccgtagttatggcatgcactgggtccgccaggctccaggcaaggggctggagtgggtggcacttatattacataatggaagcaataaatattatggagagtccgtgaagggccgattcaccatctccagagacaattccaagaacacgctgtatctgcaaatgaatagcctgagagctgaagacacggctgtgtatttctgtgcgaaaacctcgaccagtagtggctggcactactttgacagttggggccagggaaccctggtcaccgtctcctcag

SEQ ID NO: 6660 - DNA, 355 bp, Artificial Sequence
  Description of Artificial Sequence: Synthetic polynucleotide
caggtgcagctggtgcagtctggggctgaggtgaagaagcctggggcctcagtgaaggtttcctgcaaggcatctggatacaccttcaccagctactatatgcactgggtgcgacaggcccctggacaagggcttgagtggatgggaataatcaaccctagtggtggtagcacaagctacgcacagaagttccagggcagagtcaccatgaccagggacacgtccacgagcacagtctacatggagctgagcagcctgagatttgaggacacggccgtgtattactgtgcgagagcggatgcagtggctggccctgactactggggccagggaaccctggtcaccgtctcctcag

SEQ ID NO: 6661 - DNA, 352 bp, Artificial Sequence
  Description of Artificial Sequence: Synthetic polynucleotide
caggtgcagctggtgcagtctggggctgaggtgaagaagcctgggtcctcggtgaaggtctcctgcaaggcttctggaggcagcttcagaaattatgctttcagttgggtgcgactggcccctggacaagggcttgagtggatgggacagatcatccctttctttggttcaccacatttcgcacagaagttccagggcagagtcacgattaccgcggacgaatccacgagcacagcctacatggagttgagcagcctgagatctgacgacacggccgtgtattactgtgcgagagatgattttgaagtcatggcctactggggccagggaacccaggtcaccgtctcctcag

SEQ ID NO: 6662 - DNA, 358 bp, Artificial Sequence
  Description of Artificial Sequence: Synthetic polynucleotide
caggtgcagctggtgcagtctggggctgaggtgaagaagcctgggtcctcggtgaaggtctcctgcaaggcttctggaggcgccttcagcgactatgctatcttctgggtgcgacaggcccctggacaagggcttgagtggatgggagggatcatccctagctttggaacagcagactacgcacagaagttccagggcagagtcacgattaccgcggacgaatccacgaggacagtcaacatggagctgagcagcctgagatctggggacacggccgtgtattactgtgcgaaagacgggggtgtaatagcagctcctatgtactggggccagggaaccctggtcaccgtctcctcag

SEQ ID NO: 6663 - DNA, 355 bp, Artificial Sequence
  Description of Artificial Sequence: Synthetic polynucleotide
caggtgcagctggtgcagtctggggctgaggtgaagaagcctgggtcctcggtgaaggtctcctgcaaggcttctggaggcagcttcagcaactatcctttcagctgggtgcgacaggcccctggacaagggcttgagtggatgggagacatcatccctatctttggtacagcagactacgcacagaagttccagggcagagtcacgattaccgcggacgagtccacgagcacagtctacatggagctgagcagcctgagatctgaggacacggccgtctattactgtgcgagagcggatgcagtggctggccctgactactggggccagggaaccctggtcaccgtctcctcag

SEQ ID NO: 6664 - DNA, 355 bp, Artificial Sequence
  Description of Artificial Sequence: Synthetic polynucleotide
caggtccagctggtgcagtctggggctgaggtgaagaagcctgggtcctcggtgaaggtctcctgcaaggcttctggaggcagcttcagcaactatcctttcagctgggtgcgacaggcccctggacaagggcttgagtggatgggagacatcatccctatctttggtacagcagactacgcacagaagttccagggcagagtcacgattaccgcggacgagtccacgagcacagtctacatggagctgagcagcctgagatctgaggacacggccgtctattactgtgcgagagcggatgcagtggctggccctgactactggggccagggaaccctggtcaccgtctcctcag

SEQ ID NO: 6665 - DNA, 361 bp, Artificial Sequence
  Description of Artificial Sequence: Synthetic polynucleotide
caggtgcagctggtggagtctgggggaggcgtggtccagcctgggaggtccctgagactctcctgtgcatcatctggattcaccttcagcaactatggcatgcactgggtccgccagactccaggcaaggggctggagtgggtggcaaacatctggtatgatggaagtgaaaaatattatacagactccgtgaagggccgattcaccatctccagagacaattcgaagaacacattgtttctgcaaatgaacagcctgagagccgaggacaccggcatatattactgtgcgagaggccggggtaactcctacggtgtttttgatgtctggggccaaggcacacgggtcgccgtctcttcag

SEQ ID NO: 6666 - DNA, 358 bp, Artificial Sequence
  Description of Artificial Sequence: Synthetic polynucleotide
caggtgcagctgcaggagtcgggcccaggactggtgaagccttcggagaccctgttcctcacctgcactgtctctggtggctccatcagtagtcactactggaattggatccggcagtccccagggaagggactggagtggattggatatatttataacagtgaaagcaccagatataacccctccctgaagagccgagtcaccatatcagcagatacatccaagaaccaattctccctgaaactgacctctgtgacacctgcggacacggccgtctattattgtgcgagagatggcggcgagtggtcccggtattttgactactggggccagggagccctggtcaccgtctcctcag

SEQ ID NO: 6667 - DNA, 26 bp, Artificial Sequence
  Description of Artificial Sequence: Synthetic oligonucleotide
taatagttaattaactcgagccgcgg

SEQ ID NO: 6668 - protein, 6 aa, Artificial Sequence
  Description of Artificial Sequence: Synthetic 6xHis tag
HHHHHH

SEQ ID NO: 6669 - protein, 11 aa, Artificial Sequence
  Description of Artificial Sequence: Synthetic peptide
ARDGGIGSLDY

SEQ ID NO: 6670 - protein, 8 aa, Artificial Sequence
  Description of Artificial Sequence: Synthetic peptide
MQALTPRT

SEQ ID NO: 6671 - protein, 8 aa, Artificial Sequence
  Description of Artificial Sequence: Synthetic peptide
MQALTFRT

SEQ ID NO: 6672 - protein, 8 aa, Artificial Sequence
  Description of Artificial Sequence: Synthetic peptide
MQALTPHT

SEQ ID NO: 6673 - protein, 8 aa, Artificial Sequence
  Description of Artificial Sequence: Synthetic peptide
MQPLTPHT

SEQ ID NO: 6674 - protein, 9 aa, Artificial Sequence
  Description of Artificial Sequence: Synthetic peptide
QQNTYSALT

SEQ ID NO: 6675 - protein, 9 aa, Artificial Sequence
  Description of Artificial Sequence: Synthetic peptide
QQNTFSAVT

SEQ ID NO: 6676 - protein, 9 aa, Artificial Sequence
  Description of Artificial Sequence: Synthetic peptide
QQNTFSEIT

What is claimed is:

1. An isolated anti-tick-borne encephalitis virus (TBEV) antibody or antigen-binding fragment thereof that binds specifically to a TBEV antigen.

2. The antibody or antigen-binding fragment thereof of claim 1, wherein the TBEV antigen comprises a lateral ridge of domain III of the E protein (EDIII).

3. The antibody or antigen-binding fragment thereof of any one of the preceding claims, wherein the antibody or antigen-binding fragment thereof is capable of neutralizing a plurality of TBEV strains.

4. The antibody or antigen-binding fragment thereof of any one of the preceding claims, comprising three heavy chain complementarity determining regions (HCDRs) (HCDR1, HCDR2, and HCDR3) of a heavy chain variable region having an amino acid sequence of SEQ ID NO: 1, 3, 5, 7, 9, 11, 13, 15, 17, 19, 21, 23, 25, 27, 29, 31, 33, 35, 37, 39, 41, 43, 45, 47, 49, 51, 53, 55, 57, 59, 61, 63, 65, 67, 69, 71, 73, 75, 77, 79, 81, 83, 85, 87, 89, 91, 93, 95, 97, 99, 101, 103, 105, 107, 109, 111, 113, 115, or 117; and three light chain CDRs (LCDR1, LCDR2, and LCDR3) of a light chain variable region having the amino acid sequence of SEQ ID NO: 2, 4, 6, 8, 10, 12, 14, 16, 18, 20, 22, 24, 26, 28, 30, 32, 34, 36, 38, 40, 42, 44, 46, 48, 50, 52, 54, 56, 58, 60, 62, 64, 66, 68, 70, 72, 74, 76, 78, 80, 82, 84, 86, 88, 90, 92, 94, 96, 98, 100, 102, 104, 106, 108, 110, 112, 114, 116, or 118.

5. The antibody or antigen-binding fragment thereof of any one of the preceding claims, comprising:
a heavy chain variable region having an amino acid sequence with at least 75% identity to the amino acid sequence of SEQ ID NO: 1, 3, 5, 7, 9, 11, 13, 15, 17, 19, 21, 23, 25, 27, 29, 31, 33, 35, 37, 39, 41, 43, 45, 47, 49, 51, 53, 55, 57, 59, 61, 63, 65, 67, 69, 71, 73, 75, 77, 79, 81, 83, 85, 87, 89, 91, 93, 95, 97, 99, 101, 103, 105, 107, 109, 111, 113, 115, or 117; or having the amino acid sequence of SEQ ID NO: 1, 3, 5, 7, 9, 11, 13, 15, 17, 19, 21, 23, 25, 27, 29, 31, 33, 35, 37, 39, 41, 43, 45, 47, 49, 51, 53, 55, 57, 59, 61, 63, 65, 67, 69, 71, 73, 75, 77, 79, 81, 83, 85, 87, 89, 91, 93, 95, 97, 99, 101, 103, 105, 107, 109, 111, 113, 115, or 117; and
a light chain variable region having an amino acid sequence with at least 75% identity to the amino acid sequence of SEQ ID NO: 2, 4, 6, 8, 10, 12, 14, 16, 18, 20, 22, 24, 26, 28, 30, 32, 34, 36, 38, 40, 42, 44, 46, 48, 50, 52, 54, 56, 58, 60, 62, 64, 66, 68, 70, 72, 74, 76, 78, 80, 82, 84, 86, 88, 90, 92, 94, 96, 98, 100, 102, 104, 106, 108, 110, 112, 114, 116, or 118; or having the amino acid sequence of SEQ ID NO: 2, 4, 6, 8, 10, 12, 14, 16, 18, 20, 22, 24, 26, 28, 30, 32, 34, 36, 38, 40, 42, 44, 46, 48, 50, 52, 54, 56, 58, 60, 62, 64, 66, 68, 70, 72, 74, 76, 78, 80, 82, 84, 86, 88, 90, 92, 94, 96, 98, 100, 102, 104, 106, 108, 110, 112, 114, 116, or 118.

6. The antibody or antigen-binding fragment thereof of any one of the preceding claims, comprising a heavy chain variable region and a light chain variable region that comprise the respective amino acid sequences of SEQ ID NOs: 1-2, 3-4, 5-6, 7-8, 9-10, 11-12, 13-14, 15-16, 17-18, 19-20, 21-22, 23-24, 25-26, 27-28, 29-30, 31-32, 33-34, 35-36, 37-38, 39-40, 41-42, 43-44, 45-46, 47-48, 49-50, 51-52, 53-54, 55-56, 57-58, 59-60, 61-62, 63-64, 65-66, 67-68, 69-70, 71-72, 73-74, 75-76, 77-78, 79-80, 81-82, 83-84, 85-86, 87-88, 89-90, 91-92, 93-94, 95-96, 97-98, 99-100, 101-102, 103-104, 105-106, 107-108, 109-110, 111-112, 113-114, 115-116, or 117-118.

7. The antibody or antigen-binding fragment thereof of any one of the preceding claims, wherein the antibody is a bivalent or bispecific antibody.

8. The antibody or the antigen-binding fragment thereof of any one of the preceding claims, further comprising a variant Fc constant region.

9. The antibody or antigen-binding fragment thereof of any one of the preceding claims, wherein the antibody is a monoclonal antibody.

10. The antibody or antigen-binding fragment thereof of any one of the preceding claims, wherein the antibody is a chimeric antibody, a humanized antibody, a humanized monoclonal antibody, or a human antibody.

11. The antibody or antigen-binding fragment thereof of any one of the preceding claims, wherein the antibody is a single-chain antibody, a Fab fragment, or a Fab2 fragment.

12. The antibody or antigen-binding fragment thereof of any one of the preceding claims, wherein the antibody or antigen-binding fragment thereof is detectably labeled or conjugated to a toxin, a therapeutic agent, a polymer, a receptor, an enzyme, or a receptor ligand.

13. The antibody or the antigen-binding fragment thereof of claim 12, wherein the polymer is polyethylene glycol (PEG).

14. A pharmaceutical composition comprising the antibody or antigen-binding fragment thereof of any one of the preceding claims and optionally a pharmaceutically acceptable carrier or excipient.

15. The pharmaceutical composition of claim 14, wherein the pharmaceutical comprises two or more of the antibody or antigen-binding fragment thereof of any one of claims 1 to 13.

16. The pharmaceutical composition of any one of claims 14 to 15, further comprising a second therapeutic agent.

17. The pharmaceutical composition of claim 16, wherein the second therapeutic agent comprises an anti-inflammatory agent or an antiviral agent.

18. The pharmaceutical composition of claim 17, wherein the antiviral agent comprises: a nucleoside analog, a peptoid, an oligopeptide, a polypeptide, a protease inhibitor, a 3C-like protease inhibitor, a papain-like protease inhibitor, or an inhibitor of an RNA dependent RNA polymerase.

19. The pharmaceutical composition of claim 18, wherein the antiviral agent is selected from the group consisting of: acyclovir, gancyclovir, vidarabine, foscarnet, cidofovir, amantadine, ribavirin, trifluorothymidine, zidovudine, didanosine, zalcitabine, and an interferon.

20. The pharmaceutical composition of claim 19, wherein the interferon is an interferon-α or an interferon-β.

21. Use of the pharmaceutical composition of any one of claims 14 to 20 in the preparation of a medicament for the diagnosis, prophylaxis, treatment, or combination thereof of a condition resulting from tick-borne flavivirus infection.

22. A nucleic acid molecule encoding a polypeptide chain of the antibody or antigen-binding fragment thereof of any one of claims 1 to 13.

23. A vector comprising the nucleic acid molecule of claim 22.

24. A cultured host cell comprising the vector of claim 23.

25. A method of preparing an antibody, or antigen-binding portion thereof, comprising:
obtaining the cultured host cell of claim 24;
culturing the cultured host cell in a medium under conditions permitting expression of a polypeptide encoded by the vector and assembling of an antibody or fragment thereof; and
purifying the antibody or fragment from the cultured cell or the medium of the cell.

26. A kit comprising a pharmaceutically acceptable dose unit of the antibody or antigen-binding fragment thereof of any one of claims 1 to 13 or the pharmaceutical composition of any one of claims 14 to 20.

27. A kit for the diagnosis, prognosis or monitoring treatment of tick-borne flavivirus infection in a subject, comprising: the antibody or antigen-binding fragment thereof of any one of claims 1 to 13; and a least one detection reagent that binds specifically to the antibody or antigen-binding fragment thereof.

28. A method of neutralizing a tick-borne flavivirus in a subject, comprising administering to a subject in need thereof a therapeutically effective amount of a first antibody or antigen-binding fragment thereof of any one of claims 1 to 13 or a therapeutically effective amount of the pharmaceutical composition of any one of claims 14 to 20.

29. A method of preventing or treating tick-borne flavivirus infection, comprising administering to a subject in need thereof a therapeutically effective amount of a first antibody or antigen-binding fragment thereof of any one of claims 1 to 13 or a therapeutically effective amount of the pharmaceutical composition of any one of claims 14 to 20.

30. The method of claim 28, further comprising administering to the subject a therapeutically effective amount of a second antibody or antigen-binding fragment thereof, wherein the first antibody or antigen-binding fragment thereof and the second antibody or antigen binding fragment thereof exhibit synergistic activity.

31. The method of claim 29, further comprising administering to the subject a therapeutically effective amount of a second antibody or antigen-binding fragment thereof, wherein the first antibody or antigen-binding fragment thereof and the second antibody or antigen binding fragment thereof exhibit synergistic activity.

32. The method of any one of claims 30 to 31, wherein the first antibody or antigen-binding fragment thereof is administered before, after, or concurrently with the second antibody or antigen-binding fragment thereof.

33. The method of any one of claims 28 to 32, further comprising administering to the subject a therapeutically effective amount of a second therapeutic agent or therapy.

34. The method of claim 33, wherein the second therapeutic agent comprises an anti-inflammatory agent or an antiviral agent.

35. The method of claim 34, wherein the antiviral agent comprises: a nucleoside analog, a peptoid, an oligopeptide, a polypeptide, a protease inhibitor, a 3C-like protease inhibitor, a papain-like protease inhibitor, or an inhibitor of an RNA dependent RNA polymerase.

36. The method of claim 34, wherein the antiviral agent is selected from the group consisting of: acyclovir, gancyclovir, vidarabine, foscarnet, cidofovir, amantadine, ribavirin, trifluorothymidine, zidovudine, didanosine, zalcitabine, and an interferon.

37. The method of claim 36, wherein the interferon is an interferon-α or an interferon-β.

38. The method of any one of claims 33 to 37, wherein the antibody or antigen-binding fragment thereof is administered before, after, or concurrently with the second therapeutic agent or therapy.

39. The method of any one of claims 28 to 38, wherein the antibody or antigen-binding fragment thereof is administered to the subject intravenously, subcutaneously, or intraperitoneally.

40. The method of any one of claims 28 to 39, wherein the antibody or antigen-binding fragment thereof is administered prophylactically or therapeutically.

41. A method for detecting the presence of a tick-borne flavivirus in a sample comprising the steps of:
contacting a sample with the antibody or antigen-binding fragment thereof any one of claims 1 to 13; and
determining binding of the antibody or antigen-binding fragment to one or more tick-borne flavivirus antigens,
wherein binding of the antibody to the one or more tick-borne flavivirus antigens is indicative of the presence of the tick-borne flavivirus in the sample.
